(19) United States
(12) Patent Application Publication
(10) Pub. No.: US 2026/0193691 A1
(43) Pub. Date: Jul. 9, 2026

(54) METHYLATION DETECTION ASSAY

(71) Applicant: ILLUMINA, INC., San Diego, CA (US)

(72) Inventors: Eric Brustad, San Diego, CA (US); Dewei Joel Toh, Singapore (SG); Lekha Ravichandraprabhu, Singapore (SG); Anna Traczyk, Singapore (SG); Shu Ting Tan, Singapore (SG); Zahra Fahmi, Cambridge (GB); Saurabh Nirantar, Singapore (SG); Gaetano Speciale, San Diego, CA (US); June Pais, San Diego, CA (US); Bridget Dorsey, San Diego, CA (US); Stephanie Silva, San Diego, CA (US); Xiangyuan Yang, Singapore (SG); Abdul Sadeer Abd Salam, Singapore (SG); Fiona Kaper, San Diego, CA (US); Sergio Peisajovich, San Diego, CA (US)

(21) Appl. No.: 19/422,960

(22) Filed: Dec. 17, 2025

Related U.S. Application Data
(63) Continuation of application No. PCT/US2024/060952, filed on Dec. 19, 2024.
(60) Provisional application No. 63/611,967, filed on Dec. 19, 2023.

(51) Int. Cl. C12Q 1/34; C12Q 1/48; C12Q 1/6834

(52) U.S. Cl. CPC C12Q 1/34; C12Q 1/48; C12Q 1/6834; C12Q 2600/154; C12Y 305/04001

(57) ABSTRACT

The present disclosure is concerned with proteins, methods, compositions, and kits for mapping of methylation status of nucleic acids, including 5-methylcytosine and 5-hydroxymethyl cytosine. In some embodiments, the proteins selectively act on unmodified cytosines of target nucleic acids. In some embodiments, the proteins selectively act on certain modified or unmodified cytosines of target nucleic acids and include one or more substitution mutations that enhance the selectivity of the proteins for certain modified cytosines, optionally enhance the stability of the proteins, or optionally enhance both selectivity and stability. Also provided are compositions and kits that include one or more of the proteins and methods for using one or more of the proteins.

### CROSS-REFERENCE TO RELATED APPLICATIONS

[0001] This application is a continuation under 35 U.S.C. 111 (a) of International Application No. PCT/US2024/060952, filed Dec. 19, 2024, which claims the benefit of U.S. Provisional Application Ser. No. 63/611,967, filed on Dec. 19, 2023. The disclosure of any priority document claimed is incorporated by reference herein in their entirety.

### SEQUENCE LISTING

[0002] This application contains a Sequence Listing electronically submitted via Patent Center to the United States Patent and Trademark Office as an XML file entitled “2754_PCT.xml” having a size of 1,419,043 bytes and created on Dec. 19, 2024. The information contained in the Sequence Listing is incorporated by reference herein.

### FIELD

[0003] Embodiments of the present disclosure relate to preparing nucleic acids for sequencing or other applications. In particular, embodiments of the proteins, methods, compositions, and kits provided herein relate to mapping of methylation status by using sequencing libraries and other methods.

### BACKGROUND

[0004] Modified DNA cytosines, including 5-methylcytosine (5mC) and 5-hydroxymethyl cytosine (5hmC), are a well-studied epigenetic modification that play fundamental roles in human development and disease. Its genome-wide distribution differs between tissue types, and between healthy and diseased states. In recent years, 5mC has also gained prominence as a tool for clinical diagnostics: its distribution in cell-free DNA (cfDNA)—obtained from a liquid biopsy-can be used for the tissue-specific prediction of early-stage cancer or monitoring of cancer recurrence or remission after treatment. As a result, there has been an intense focus on developing methods for mapping modified DNA cytosines at single base resolution, with minimal loss of sample DNA quantity, quality, and complexity. Current methods for mapping modified DNA cytosines, however, often exhibit limitations including (i) degradation of sample DNA due to prolonged chemical treatment at non-neutral pH and high temperatures, (ii) loss of sample DNA complexity due to conversion of unmethylated DNA bases to uracil, resulting in low complexity genome mapping, (iii) multi-step conversion, requiring both enzymes and chemical treatment, and (iv) for antibody-based 5mC detection, resolution of detection is limited to ~150 bp, precluding the identification of its exact location in the genome.

[0005] 5-hydroxymethylcytosine (5hmC) is an oxidized derivative of the widely studied epigenetic modification 5-methylcytosine (5mC). Increasing evidence supports the biological importance of 5hmC in diverse developmental processes in mammals, such as neurogenesis. As such, there is widespread interest in determining the localization of 5hmC in DNA from healthy and diseased patients. The majority of methods for mapping 5-hydroxymethylcytosine (5hmC) require bisulfite treatment, which results in significant DNA loss and damage. Recent methods for mapping 5hmC have been developed, such as oxBS-seq, TAB-seq, and ACE-seq, but some include bisulfite treatment, and all involve multiple steps using different enzymes.

[0006] Modified cytosine derivatives, such as 5mC and 5hmC, can be detected enzymatically by treatment with cytosine deaminases.

### SUMMARY OF THE APPLICATION

[0007] The present disclosure provides proteins, methods, compositions, and kits for determining the methylation status of DNA and RNA. The methods and compositions include a DNA methyltransferase. In one or more embodiments, the composition and methods include a cytosine-specific methyltransferase. In one or more embodiments, the composition and methods include a cytidine deaminase, specifically an altered cytidine deaminase.

[0008] In one or more embodiments, the cytosine-specific methyltransferase preferentially acts on unmodified cytosine. The methyltransferase may not be able to act on modified cytosine, such as 5mC or 5hmC. In one or more embodiments, the methyltransferase is a cytosine-specific methyltransferase from Malacoplasma penetrans, also referred to herein as “M. MpeI methyltransferase.”

[0009] In one or more embodiments, the cytosine-specific methyltransferase uses a cofactor. The cofactor may be an S-adenosyl-L-methionine (SAM) analog, also referred to herein as a “XSAM.” The SAM analog may include a protective group. Typically, the protective group is installed on an unmodified cytosine by the cytosine-specific methyltransferase. In one or more embodiments, the protective group includes a carboxy group. In one or more embodiments, the XSAM includes S-adenosyl-L-methionine and a protective group. In one or more embodiments, the protective group is a carboxy group.

[0010] In one or more embodiments, a kit, method, or composition of the present disclosure includes a cytosine-specific methyltransferase and an altered cytidine deaminase (ACD). In one embodiment, the ACD includes one or more selectivity-enhancing alteration, preferably two or more selectivity-enhancing alterations and wild-type activity, 5mC-selective deaminase activity, 5hmC-defective deaminase activity, or 5mC- and 5hmC-preferring deaminase activity. The at least one selectivity-enhancing alteration is a substitution mutation, a deletion, an insertion, or a combination thereof. In one embodiment, selectivity-enhancing alterations are selected from substitution mutations at a position functionally equivalent to H29X, K30X, T31X, W98X, S99X, P100X, F102X, S103X, W104X, G105, Y130X, D131X, Y132X, D133X, OR P134X, or a combination thereof, wherein the position number designation is functionally equivalent to the position in a wild-type APOBEC3A (SEQ ID NO:3) and X is an amino acid substitution different from the wild-type amino acid at that position. In one embodiment, selectivity-enhancing alterations are selected from substitution mutations at a position functionally equivalent to S97X, 1124X, R128X, I129X, and 152X; N57X, R74X, F75X, L78X, F158X, and W162X; or F125X, A126X, A127X, P134X, Y136X, wherein the position number designation is functionally equivalent to the position in a wild-type APOBEC3A (SEQ ID NO:3) and X is an amino acid substitution different from the wild-type amino acid at that position. In one embodiment, selectivity-enhancing alterations are selected from substitution mutations at a position functionally equivalent to S103X and optionally a deletion of the amino acids at positions functionally equivalent to the tryptophan and glycine at positions 104 and 105. In another embodiment, selectivity-enhancing alterations are selected from substitution mutations selected from Table 2, 3, or 4.

[0011] An ACD can further include one or more stability enhancing alterations, such as a substitution mutation, a deletion, an insertion, or a combination thereof. Examples of substitution mutations include, but are not limited to, those at a position functionally equivalent to a stability-enhancing mutation selected from Table 4, 5, 7, or 8. Examples of deletions include, but are not limited to, those in Table 6. An ACD can include at least one substitution mutation and at least one deletion. Examples of combinations of substitution mutations and/or deletions include, but are not limited to, the stability-enhancing alterations in Table 4, 5, 6, 7, 8, 9, or 10. Also included in the present disclosure are polynucleotides encoding an ACD described herein, compositions that include an ACD described herein, and methods of using an ACD described herein.

### BRIEF DESCRIPTION OF THE FIGURES

[0012] The following detailed description of illustrative embodiments of the present disclosure may be best understood when read in conjunction with the following drawings.

[0013] FIG. 1A-C shows the deamination scope of APOBEC3A. Cytosine (C), 5-methylcytosine (5mC), and 5-hydroxymethylcytosine (5hmC) nucleobases in single-stranded DNA are well characterized substrates of APOBEC3A. FIG. 1A shows conversion of C to uracil (U) by APOBEC3A. FIG. 1B shows conversion of 5mC to thymidine (T) by APOBEC3A. FIG. 1C shows conversion of 5hmC to 5-hydroxymethyl uracil (5hmU) by APOBEC3A. “ [symbol] ” denotes the connection of the nucleobases to a single-stranded DNA molecule.

[0014] FIG. 1D-I shows the result of treating a DNA sample with a wild-type APOBEC3A enzyme and altered cytidine deaminases. FIG. 1D is an example of treatment with a wild-type APOBEC3A. FIG. 1E is an example of treatment with an 5mC-preferring altered cytidine deaminase described herein. FIG. 1F-H are examples of detection of 5hmC using different altered cytidine deaminases described herein. FIG. 1F is an example of an altered cytidine deaminase that deaminates C and 5mC and does not deaminate 5hmC. FIG. 1G is an example of an altered cytidine deaminase that deaminates 5mC and 5hmC, but does not deaminate C. FIG. 1H is an example of an altered cytidine deaminase that deaminates 5hmC, but does not deaminate C or 5mC. The top strand of FIG. 1D-H shows C, 5mC, and/or 5hmC bases, and the bottom strand of FIG. 1D-H underlines the changed bases. 5mC nucleobases are marked with CH₃, 5hmC nucleobases are marked with CH₂—OH, 5-hydroxymethyl uracil nucleobases are designated with small case “u” and uracil nucleobases are designated with capital “U.” FIG. 1I shows the result of treating a DNA sample with a cytosine-specific methyltransferase (cMTx) and XSAM. The top strand shows C, 5mC, and/or 5hmC bases, and the bottom strand shows the same sequence with a protective group added to each previously unmodified C. Protected C are marked with X on the bottom side of the DNA strand.

[0015] FIG. 2A-B describes examples of modified cytosine nucleobases. FIG. 2A shows cytosine and examples of modified cytosine nucleobases in DNA. The “ [symbol] ” denotes the connection of the nucleobases to a DNA molecule. FIG. 2B shows the numbering scheme for cytosine as used herein.

[0016] FIG. 3 is a schematic showing alignment of cytidine deaminase amino acid sequences using the Clustal O algorithm. An “*” (asterisk) indicates positions which have a single, fully conserved residue between some cytidine deaminases. A “:” (colon) indicates conservation between groups of strongly similar properties as below-roughly equivalent to scoring>0.5 in the Gonnet PAM 250 matrix. A “.” (period) indicates conservation between groups of weakly similar properties as below-roughly equivalent to scoring=<0.5 and >0 in the Gonnet PAM 250 matrix. The amino acids marked with “A” show the ZDD motif SEQ ID NO: 12 (e.g., above amino acids 70 to 106 of sp|P31941|1-199). The amino acids marked with “\hat{ }” and “#” show the ZDD motif SEQ ID NO:13 (e.g., above amino acids 70 to 153 of sp|P31941|1-199). sp|P31941|1-199 is a human APOBEC3A, SEQ ID NO:3; XP_045219544.1 is an APOBEC3A from Macaca fascicularis, SEQ ID NO:19; AER45717.1 is an APOBEC3A from Pongo pygmaeus, SEQ ID NO:20; XP_003264816.1 is an APOBEC3A from Nomascus leucogenys, SEQ ID NO:21; PNI48846.1 is an APOBEC3A from Pan troglodytes, SEQ ID NO:22; and ADO85886.1 is an APOBEC3A from Gorilla gorilla, SEQ ID NO:23.

[0017] FIG. 4 shows deaminase activity of wild type (NEB APOBEC) and mutant APOBEC variants on substrates including unmodified C, 5mC, and 5hmC. Percent deamination values were determined from a SwaI restriction enzyme assay and quantified. C deamination activity was measured in two independent experiments corresponding to the left and right panels.

[0018] FIG. 5 shows a method for 5hmC detection using deaminase-based sequencing.

[0019] FIG. 6 shows the total point mutations that have been tested at each amino acid position of an APOBEC3A (SEQ ID NO:3). Stabilizing mutations (black) denote variants which passed an initial screen to suggest stabilization over the parent construct (representing 20% of all variants tested).

[0020] FIG. 7A-7B show altered cytidine deaminases containing single point mutations in a Y130A/Y132H/C171A background. Proteins were expressed, purified and assessed for stability compared to the parent construct using either a (FIG. 7A) fluorimetry based assay to measure the Tm; or (FIG. 7B) LC/MS based activity assay performed at various temperatures. The optimal reaction temperature is shifted for stabilizing mutations compared to the parent construct, with higher 5mC conversion achieved at higher temperatures.

[0021] FIG. 8A-8B show altered cytidine deaminases containing mutations in a Y130A/Y132H/D133W/R74L/T19Y/C171A (ScE, SEQ ID NO:72) background that were expressed, purified and screened for stability. (FIG. 8A) An LC/MS assay was used to measure the fraction 5mC converted in a DNA oligo after incubation at 45° C. in the presence of denaturants (20% DMSO, 2M betaine). Variants with a higher 5mC conversion than the parent construct (black) were moved forward to screening in a sequencing-based assay. (FIG. 8B) Temperature profile using a sequencing-based assay. 200 nM enzyme was incubated with substrate for 60 min at various temperatures. The optimal reaction temperature is shifted for stabilizing mutations, with higher 5mC conversion achieved at higher temperatures. All data points represent the mean of duplicate measurements.

[0022] FIG. 9 shows melting temperatures for selected constructs. C171A and T19Y confer higher stability in two different backgrounds compared to the parent construct. Stability improvements are additive as mutations are stacked in a Y130A/Y132H/D133W background.

[0023] FIG. 10 shows a temperature profile using a sequencing-based assay. The optimal reaction temperature is shifted for stabilizing mutations, with higher 5mC conversion achieved at higher temperatures.

[0024] FIG. 11 shows selectivity curves NEB APOBEC and 5mC-selective APOBEC3A mutants. Various 5mC and C % deamination data points of NEB APOBEC and engineered 5mC-selective APOBECs were plotted (X-axis represents 5mC deamination (%); Y-axis represents C deamination (%)). Data points were generated by subjecting the APOBECs to various deamination conditions, such as protein amounts and time points. Scatter plot made up of the data points of respective proteins can be traced forming the selectivity curves. The more the selectivity curve lean towards the X-axis, the more 5mC selective it is.

[0025] FIG. 12 shows the architecture of engineered A3A dimers. Several homodimeric and heterodimeric constructs were designed. Two engineered APOBEC3A (A3A) are fused together by a 32 amino acids peptide linker. The homodimers were Y130A/Y132H/D133W, with or without R74L stability mutations. There were 4 heterodimers made up of engineered A3A (Y130A/Y132H/D133W) with and without R74L at the N or C-terminal, and A3A (E72A) at the N or C-terminal. All proteins were expressed with a C terminal His tag.

[0026] FIG. 13A-13D shows engineered A3A dimers that show significant improvement of activity at higher reaction temperature. (FIG. 13A) Deamination activity of each enzyme (0.7 μM) was evaluated in NGS-based quantitative deamination assay at various reaction time and temperature (25° C., 37° C., 42° C., and 50° C.). (FIG. 13B) Fusing the mutants with a linker did not affect their selectivity. Data points show deaminated C (%) plotted against deaminated 5mC (%) generated by the monomers, heterodimers and homodimers, trendlines generated at respective deamination incubation temperatures (25° C., 37° C., 42° C. and 50° C.) tested were continuous, indicating that the dimers exhibited comparable selectivity to monomeric constructs. (FIG. 13C) At 42° C., 5mC deamination was favored (selectivity curve leaning towards the right and X-axis), compared to 25° C. and 37° C. (FIG. 13D) The engineered homodimer was found to be more active and thermal stable than the monomer. Both monomers and dimers were purified by Ni-NTA affinity, heparin-affinity chromatography and desalted. The heparin purification step resulted in faster enzyme kinetics at 37° C. in both monomer and dimer, but the high reactivity at higher temperature was not observed in monomer. At 50° C., the monomer had close to zero activity, whereas the dimer was able to deaminate up to ~50% of mC within 15 minutes at 50° C. All these improved performances of the dimer were not observed in monomer even when double amount of monomer is added to the reaction (0.2 μM and 0.4 μM).

[0027] FIG. 14A-14C shows that the R74L/Y130A/Y132H/D133W dimer has improved stability at temperatures between 40° C.-50° C. (FIG. 14A) At y-axis, 5mC to T conversion level in the fully-CpG methylated pUC19 and C to U conversion in non-methylated lambda DNA indicate the true positive and false positive conversion, respectively. On NaOH-treated library, the dimer could withstand higher reaction temperature up to 42° C. without showing reduced enzyme activity, whereas the activity of monomer declined at temperatures above 38° C. When the monomer was supplemented with 10 μM ZnC12, higher reaction temperatures were tolerated, but the effect was not as substantial as in the dimer. For libraries denatured in DMSO, dimer constructs enabled the reaction to withstand temperatures up to 38° C. without showing reduced enzyme activity, whereas the activity of the monomer declined at temperatures above 33° C. This demonstrates that dimerization is enables higher reaction temperatures in multiple reaction formulations. (FIG. 14B) 5mC to T conversion level in both methylated DNA and C to U conversion level in non-methylated DNA are normalized to 1 by its maximum level for in order to compare how temperature affects conversion in methylated and unmethylated DNA. (FIG. 14C) Monomer and homodimer are incubated with the denatured library at various temperatures, the resulted data points were fitted to polynomial regression, and the maximum point of the fitted curve is considered as the temperature at which the enzyme has the highest level of 5mC or C deamination (Tmax). Tmax values are elevated for the monomer with 10 μM Zn added and are even higher for the homodimer.

[0028] FIG. 15 shows that the dimer has improved reaction kinetics compared to monomer. Variation of initial velocity (y-axis) of the reaction at varying amount of DNA substrate (x-axis). Deamination reactions were performed at 45° C., using 1 μM of monomer and 0.5 μM of dimer, to achieve the same equivalent of active sites added in the reaction. Linear rates were measured by incubation of the reactions at 5 nM, 10 nM, 20 nM, 40 nM, 80 nM, 120 nM, 160 nM, or 200 nM of DNA substrate for 2 minutes, 5 minutes, 10 minutes, and 15 minutes-followed by heat inactivation at 95° C. for 5 minutes. The reactions were sequenced as for Example 3, and the percentage of conversion converted in nM of product generated, and fitted to linear regression to obtain the velocity.

[0029] FIG. 16A-B show activities of dACD having D133V and a dACD D133W. R74L/Y130A/Y132H/D133W dimer and R74L/Y130A/Y132H/D133V dimer purification and temperature activity screening. (FIG. 16A) SDS-PAGE shows expression of engineered dimers, bovine serum albumin (BSA) was used for approximating protein concentration. (FIG. 16B) NGS-based deamination quantification assay on oligo 1 at various temperatures and time points (30 and 60 min). Y-axis represents the % deamination C, 5hmC and 5mC are color coded yellow, green and blue, respectively.

[0030] FIG. 17A-17D shows activities of a dACD having D133V and dACD having D133W. T19Y/R74L/Y130A/Y132H/D133W dimer (bottom data points) and T19Y/R74L/Y130A/Y132H/D133V dimer (top data points) selectivity. (FIG. 17A) Percentage C deamination versus 5mC deamination. (FIG. 17B) Percentage 5hmC deamination versus 5mC deamination. (FIG. 17C) Respective time course of C, 5mC, and 5hmC deamination. (FIG. 17D) Deamination data at 10 min time point represented as stacked histogram (normalized to total substrate deamination) and side by side histogram (% deamination of each substrate).

[0031] FIG. 18 shows an example of a strategy for 5mC and 5hmC-based, NGS-based single base resolution mapping using differences in the modified cytosines. C deamination preferences of two dimer ACDs (SEQ ID NO:214 and SEQ ID NO:215).

[0032] FIG. 19 shows an example of a method for fluorescein in situ hybridization in cells and tissues to prove for epigenetic status of a biomarker two-color code to readout C status, DAPI and FAM. Blue-blue (the first sequential readout) is unmodified C, green-green (the second sequential readout) is 5mC, and blue-green is 5hmC (the third sequential readout). Imaging is invalid in the case of green-blue.

[0033] FIG. 20 shows the sequence of a 101-mer oligonucleotide substrate (SEQ ID NO:60) used in a quantitative NGS-based deamination analysis. 5mC nucleobases are marked with CH₃, 5hmC nucleobases are marked with CH₂—OH. The underlined sequence is the minimal portion of the substrate that contains various modified and unmodified C.

[0034] FIG. 21A-1, 21A-2, and 21B show deamination activity of 400 altered cytidine deaminases with combinatorial mutations at 130 and 133 positions, in the presence of Y132H mutation and seven stabilizing mutations (R74L, T19Y, C171A, G108A, G188R, G25K, S45W). (FIG. 21A-1, 21A-2) mutants are grouped by the amino acid residue at position 130 in 20 subplots, where the x-axis indicates the amino acid residues at 133. For each amino acid residues at 130 position in the 20 subplots the results for deamination are shown in the order of C, 5mC, 5hmC. (FIG. 21B) All 20 Y130D mutants showed generally reduced activity, yet some of them showed potentials as 5hmC-specific deaminases, especially Y130D/D133Z where Z=A, G, S, or T (see arrows), in which the percentage of deaminated 5hmC were higher than that of C and mC. For each amino acid residue at 133 position the upper graph the results for deamination are shown in the order of C, 5mC, 5hmC. For each amino acid residues at 133 position each bar lists, from bottom to top, deamination of 5hmC, 5mC, C.

[0035] FIG. 22A-22C shows deamination activities of APOBEC3A mutants carrying a Y130D mutation in combinations with Y132H/R/K and D133A/G/S/T. (FIG. 22A) Y130D variants purified using a KingFisher instrument visualized on SDS-PAGE gel, among which DHG, DHS, DRA failed to be expressed. One microliter of protein was added to 10 μL deamination reaction containing 50 mM Bis Tris pH6.5, 2.5 M betaine and 10 nM of DNA substrate. The temperature of the assay was 37 degrees C. and the KingFisher eluate times were 30 minutes, 2 hours, and 4. APOBEC mutants are labelled as 3-letters which represent the amino acids at 130, 132 and 133 positions, respectively. (FIG. 22B) Deamination activity of the mutants presented in stacked bar charts (normalized to total deamination of C, 5mC and 5hmC), grouped by Y132 and D133 mutations. Each bar lists, from bottom to top, deamination of 5hmC, 5mC, C. (FIG. 22C) Percentage 5hmC deamination versus 5mC deamination. The left panel is an expansion of the right panel X-axis Deaminated mC (%) from 0 to 15%.

[0036] FIG. 23A-23D shows assessment of 5hmC selectivity of Y130D variants using purified protein. (FIG. 23A) Ni-NTA purified and desalted protein visualized on SDS-PAGE, along with Bovine serum albumin (BSA) standards for protein concentration estimation. (FIG. 23B) Experimental parameters of Y130D variants compared against APOBEC3A R74L/Y130A/Y132H/D133V dimer (AHV) which could deaminate both 5hmC and 5mC almost equally. (FIG. 23C) Percentage 5hmC deamination activity is plotted against deaminated 5mC. (FIG. 23D) Percentage 5hmC deamination activity is plotted against deaminated C.

[0037] FIG. 24A-24B shows representations of a methyltransferase and the results of reacting unmodified C with the methyltransferase and a SAM analog. FIG. 24A shows the structure of M. MpeI methyltransferase and a schematic representing treatment of a dsDNA with the methyltransferase. FIG. 24B shows several substrates and the results of treating cytosine with each substrate and an appropriate methyltransferase.

[0038] FIG. 25A-25B shows the structure of S-adenosyl-L-methionine (SAM) and several SAM analogs (XSAMs). FIG. 25A, S-adenosyl-L-methionine (SAM). FIG. 25B, S-adenosyl-L-methionine analog (XSAM), where “X” includes a protective group and a methylene group via which the protective group is coupled to the sulfonium ion (S⁺).

[0039] FIG. 26 shows a flowchart describing an example of a method consistent with the methods described herein.

[0040] FIG. 27A-27S show amino acid sequences of SEQ ID NOs: 16, 17, 37-56, and 68-77.

[0041] Schematic drawings are not necessarily to scale. Like numbers used in the figures refer to like components, steps and the like. However, it will be understood that the use of a number to refer to a component in a given figure is not intended to limit the component in another figure labeled with the same number. In addition, the use of different numbers to refer to components is not intended to indicate that the different numbered components cannot be the same or similar to other numbered components.

### DETAILED DESCRIPTION OF EXEMPLARY EMBODIMENTS

[0042] Terms used herein will be understood to take on their ordinary meaning in the relevant art unless specified otherwise. Several terms used herein and their meanings are set forth below.

[0043] As used herein, a “derivative” of methylcytosine refers to methylcytosine having an oxidized methyl group. A nonlimiting example of an oxidized methyl group is hydroxymethyl group (—CH₂OH), in which case the mC derivative may be referred to as hydroxymethylcytosine or hmC. Another nonlimiting example of an oxidized methyl group is a formyl group (—CHO) in which case the mC derivative may be referred to as formylcytosine or fC. Another nonlimiting example of an oxidized methyl group is a carboxyl group (—COOH), in which case the mC derivative may be referred to as carboxylcytosine or caC. The oxidized methyl group may be located at the 5 position of the cytosine, in which case the hmC may be referred to as 5hmC, the fC may be referred to as 5fC, or the caC may be referred to as 5caC.

[0044] As used herein, a “derivative” of thymine (T) refers to thymine having an oxidized methyl group. A nonlimiting example of an oxidized methyl group is a hydroxymethyl group (—COH), in which case the T derivative may be referred to as hydroxymethyl thymine or hT. The oxidized methyl group may be located at the 5 position of the thymine, in which case the hT may be referred to as “5 hT”.

[0045] As used herein, S-adenosyl-L-methionine (SAM) refers to a compound having the structure shown in FIG. 25A. The methyl group bound at the sulfonium (S⁺) ion may be transferred to cytosine by a methyltransferase in a manner such as described in Deen et al. (“Methyltransferase-directed labeling of biomolecules and its applications,” Angewandte Chemie International Edition 56:5182-5200 (2017). A counterion will likely be present, such as chlorine (Cl⁻), or the proton may be removed from the COOH to provide a neutral atom. Additionally, the SAM in solution may be in a zwitterionic form (COO⁻, NH₃⁺).

[0046] As used herein, the term “S-adenosyl-L-methionine analog” or “SAM” refers to a compound having the structure shown in FIG. 25B, where “X” includes a protective group and a methylene group via which the protective group is coupled to the sulfonium (S⁺). X may be compatible with the activity of one or more enzymes, and may inhibit the activity of one or more enzymes. For example, as described in greater detail herein, X may be compatible with the activity of a methyltransferase enzyme, such that the methyltransferase may act upon the XSAM to transfer X, which is bound at the sulfonium ion of XSAM, to cytosine to form XC in a similar manner as described in Deen et al. (“Methyltransferase-directed labeling of biomolecules and its applications,” Angewandte Chemie International Edition 56:5182-5200 (2017), in which the methyltransferase acts upon SAM to transfer the sulfonium-bound methyl group to cytosine to form mC. Additionally or alternatively, X may be incompatible with the activity of a cytidine deaminase enzyme, such that the cytidine deaminase enzyme may not act upon XC to deaminate the XC in a similar manner as the cytidine deaminase otherwise would act upon C to form U, upon mC to form T, or upon hmC to form hT. Nonlimiting examples of X include a methylenealkyne group, a methylenecarboxyl group, a methyleneamino group, a methylenehydroxymethyl group, a methyleneisopropyl group, or a methylene dye group.

[0047] As used herein, the terms “organism,” “subject,” are used interchangeably and refer to microbes (e.g., prokaryotic or eukaryotic) animals and plants. An example of an animal is a mammal, such as a human.

[0048] As used herein, the term “target nucleic acid,” is intended as a semantic identifier for the nucleic acid in the context of a method or composition or kit set forth herein and does not necessarily limit the structure or function of the nucleic acid beyond what is otherwise explicitly indicated. Reference to a nucleic acid such as a target nucleic acid includes both single-stranded and double-stranded nucleic acids, and both DNA and RNA, unless indicated otherwise. The term library refers to the collection of target nucleic acids containing known common sequences, such as a universal sequence or adapter, at their 3′ and 5′ ends.

[0049] As used herein, a “methyltransferase enzyme,” “methyltransferase,” “MTx,” or “MTase” refers to an enzyme that may add a methyl group to (or “methylate”) a substrate, or may remove a methyl group from (or “demethylate”) a substrate. Some methyltransferases may add the methyl group (Me) from SAM to a substrate, such as C, and also, or alternatively, may add the protective group (X) from XSAM to such a substrate, such as C. Nonlimiting examples of methyltransferases suitable for adding protective group X from XSAM to C include mammalian methyltransferases such as DNMT1, DNMT3A, and DNMT3B described in Jin et al., “DNA methyltransferases (DNMTs), DNA damage repair, and cancer,” Adv Exp Med Biol. 754:3-29 (2013), the entirety of which is incorporated by reference herein, and bacterial methyltransferases such as dam and CpG (M.SssI) commercially available from New England Biolabs (Ipswitch, MA). Some methyltransferases may remove an oxidized methyl group (such as formyl or carboxyl) from a substrate, such as caC.

[0050] As used herein, the term “adapter” and its derivatives, e.g., universal adapter, refers generally to any linear oligonucleotide which can be attached to a target nucleic acid. An adapter can be single-stranded or double-stranded DNA, or can include both double-stranded and single-stranded regions. An adapter can include a universal sequence that is substantially identical, or substantially complementary, to at least a portion of a primer, for example a universal primer; an index (also referred to herein as a barcode or tag) to assist with downstream error correction, identification, or sequencing; and/or a unique molecular identifier. In some embodiments, the adapter is substantially non-complementary to the 3′ end or the 5′ end of any target sequence present in the sample. In some embodiments, suitable adapter lengths are in the range of about 6-100 nucleotides, about 12-60 nucleotides, or about 15-50 nucleotides in length. For instance, the terms “adaptor” and “adapter” are used interchangeably.

[0051] As used herein, the term “universal,” when used to describe a nucleotide sequence, refers to a region of sequence that is common to two or more nucleic acid molecules where the molecules also have regions of sequence that differ from each other. A universal sequence that is present in different members of a collection of nucleic acids can be used as, for instance, a “landing pad” in a subsequent step to anneal a nucleotide sequence that can be used as a primer for addition of another nucleotide sequence, such as an index, to a target nucleic acid. A universal sequence that is present in different members of a collection of nucleic acids can allow capture of multiple different nucleic acids using a population of universal capture nucleic acids, e.g., capture oligonucleotides that are complementary to a portion of the universal sequence, e.g., a universal capture sequence. Non-limiting examples of universal capture sequences include sequences that are identical to or complementary to P5 and P7 primers. Similarly, a universal sequence present in different members of a collection of molecules can allow the replication (e.g., sequencing) or amplification of multiple different nucleic acids using a population of universal primers that are complementary to a portion of the universal sequence, e.g., a universal anchor sequence. In one embodiment universal anchor sequences are used as a site to which a universal primer (e.g., a sequencing primer for read 1 or read 2) anneals for sequencing. A capture oligonucleotide or a universal primer therefore includes a sequence that can hybridize specifically to a universal sequence.

[0052] The terms “P5” and “P7” may be used when referring to a universal capture sequence or a capture oligonucleotide. The terms “P5′” (P5 prime) and “P7′” (P7 prime) refer to the complement of P5 and P7, respectively. It will be understood that any suitable universal capture sequence or a capture oligonucleotide can be used in the methods presented herein, and that the use of P5 and P7 are exemplary embodiments only. Uses of capture oligonucleotides such as P5 and P7 or their complements on flow cells are known in the art, as exemplified by the disclosures of WO 2007/010251, WO 2006/064199, WO 2005/065814, WO 2015/106941, WO 1998/044151, and WO 2000/018957, which are incorporated by reference as to P5 and P7 and their uses. For example, any suitable forward amplification primer, whether immobilized or in solution, can be useful in the methods presented herein for hybridization to a complementary sequence and amplification of a sequence. Similarly, any suitable reverse amplification primer, whether immobilized or in solution, can be useful in the methods presented herein for hybridization to a complementary sequence and amplification of a sequence. One of skill in the art will understand how to design and use primer sequences that are suitable for capture and/or amplification of nucleic acids as presented herein.

[0053] As used herein, the term “primer” and its derivatives refer generally to any nucleic acid that can hybridize to a target sequence of interest. Typically, the primer functions as a substrate onto which nucleotides can be polymerized by a polymerase or to which a polynucleotide can be ligated; in some embodiments, however, the primer can become incorporated into the synthesized nucleic acid strand and provide a site to which another primer can hybridize to prime synthesis of a new strand that is complementary to the synthesized nucleic acid molecule. In some embodiments, the primer can be used for hybridization to a predetermined sequence, for instance a predetermined sequence that includes one or more nucleotides that identify the location of a modified cytosine. In one embodiment, a “primer” includes a sequence present in a guide RNA used with a CRISPR-based system to hybridize to a predetermined sequence. The primer can include any combination of nucleotides or analogs thereof. In some embodiments, the primer is a single-stranded oligonucleotide or polynucleotide.

[0054] The terms “polynucleotide” and “oligonucleotide” and “nucleic acid” are used interchangeably herein to refer to a polymeric form of nucleotides of any length, and may include ribonucleotides, deoxyribonucleotides, analogs thereof, or mixtures thereof. The terms should be understood to include, as equivalents, analogs of either DNA, RNA, cDNA, or antibody-oligo conjugates made from nucleotide analogs and to be applicable to single stranded (such as sense or antisense) and double stranded polynucleotides. The term as used herein also encompasses cDNA, that is complementary or copy DNA produced from a RNA template, for example by the action of reverse transcriptase.

[0055] As used herein, an “index” (also referred to as an “index region,” “index adaptor,” “tag,” or a “barcode”) refers to a unique nucleic acid tag that can be used to identify a sample or source of the nucleic acid material, or a compartment in which a target nucleic acid was present. The index can be present in solution or on a solid-support, or attached to or associated with a solid-support and released in solution or compartment. When nucleic acid samples are derived from multiple sources, the nucleic acids in each nucleic acid sample can be tagged with different nucleic acid tags such that the source of the sample can be identified. Any suitable index or set of indexes can be used, as known in the art and as exemplified by the disclosures of U.S. Pat. No. 8,053,192, PCT Publication No. WO 05/068656, and U.S. Pat. Publication No. 2013/0274117. In some embodiments, an index can include a six-base Index 1 (17) sequence, an eight-base Index 1 (i7) sequence, an eight-base Index 2 (i5e) sequence, a ten-base Index 1 (17) sequence, or a ten-base Index 2 (15) sequence from Illumina, Inc. (San Diego, CA).

[0056] As used herein, the term “amplicon,” when used in reference to a nucleic acid, means the product of copying the nucleic acid, wherein the product has a nucleotide sequence that is the same as or complementary to at least a portion of the nucleotide sequence of the nucleic acid. An amplicon can be produced by any of a variety of amplification methods that use the nucleic acid, or an amplicon thereof, as a template including, for example, polymerase extension, polymerase chain reaction (PCR), rolling circle amplification (RCA), ligation extension, or ligation chain reaction. An amplicon can be a nucleic acid molecule having a single copy of a particular nucleotide sequence (e.g., a PCR product) or multiple copies of the nucleotide sequence (e.g., a concatemeric product of RCA). A first amplicon of a target nucleic acid is typically a complementary copy. Subsequent amplicons are copies that are created, after generation of the first amplicon, from the target nucleic acid or from the first amplicon. A subsequent amplicon can have a sequence that is substantially complementary to the target nucleic acid or substantially identical to the target nucleic acid.

[0057] As used herein, “amplify”, “amplifying” or “amplification reaction” and their derivatives, refer generally to any action or process whereby at least a portion of a nucleic acid molecule is replicated or copied into at least one additional nucleic acid molecule. The additional nucleic acid molecule optionally includes sequence that is substantially identical or substantially complementary to at least some portion of the template nucleic acid molecule. The template nucleic acid molecule can be single-stranded or double-stranded and the additional nucleic acid molecule can independently be single-stranded or double-stranded. Amplification is typically the exponential replication of a nucleic acid molecule. In some embodiments, such amplification can be performed using isothermal conditions; in other embodiments, such amplification can include thermocycling. In some embodiments, the amplification is a multiplex amplification that includes the simultaneous amplification of a plurality of target sequences in a single amplification reaction. In some embodiments, “amplification” includes amplification of at least some portion of DNA and RNA based nucleic acids alone, or in combination. The amplification reaction can include any of the amplification processes known to one of ordinary skill in the art. In some embodiments, the amplification reaction includes polymerase chain reaction (PCR).

[0058] As used herein, the term “polymerase chain reaction” (“PCR”) refers to the method of Mullis U.S. Pat. Nos. 4,683,195 and 4,683,202, which describe a method for increasing the concentration of a segment of a polynucleotide of interest in a mixture of genomic DNA without cloning or purification. This process for amplifying the polynucleotide of interest consists of introducing a large excess of two oligonucleotide primers to the DNA mixture containing the desired polynucleotide of interest, followed by a series of thermal cycling in the presence of a DNA polymerase. The two primers are complementary to their respective strands of the double stranded polynucleotide of interest. The mixture is denatured at a higher temperature first and the primers are then annealed to complementary sequences within the polynucleotide of interest molecule. Following annealing, the primers are extended with a polymerase to form a new pair of complementary strands. The steps of denaturation, primer annealing and polymerase extension can be repeated many times (referred to as thermocycling) to obtain a high concentration of an amplified segment of the desired polynucleotide of interest. The length of the amplified segment of the desired polynucleotide of interest (amplicon) is determined by the relative positions of the primers with respect to each other, and therefore, this length is a controllable parameter. By virtue of repeating the process, the method is referred to as PCR. Because the desired amplified segments of the polynucleotide of interest become the predominant nucleic acid sequences (in terms of concentration) in the mixture, they are said to be “PCR amplified”. In a modification to the method discussed above, the target nucleic acid molecules can be PCR amplified using a plurality of different primer pairs, in some cases, one or more primer pairs per target nucleic acid molecule of interest, thereby forming a multiplex PCR reaction.

[0059] As used herein, “amplification conditions” and its derivatives, generally refers to conditions suitable for amplifying one or more nucleic acid sequences. In some embodiments, the amplification conditions can include isothermal conditions or alternatively can include thermocycling conditions, or a combination of isothermal and thermocycling conditions. In some embodiments, the conditions suitable for amplifying one or more nucleic acid sequences include polymerase chain reaction (PCR) conditions. Typically, the amplification conditions refer to a reaction mixture that is sufficient to amplify nucleic acids such as one or more target sequences flanked by a universal sequence, or target specific primers, or to amplify an amplified target sequence flanked by one or more adapters. Generally, the amplification conditions include a catalyst for amplification or for nucleic acid synthesis, for example a polymerase; a primer that possesses some degree of complementarity to the nucleic acid to be amplified; and nucleotides, such as deoxyribonucleotide triphosphates (dNTPs) to promote extension of the primer once hybridized to the nucleic acid. The amplification conditions can require hybridization or annealing of a primer to a nucleic acid, extension of the primer and a denaturing step in which the extended primer is separated from the nucleic acid sequence undergoing amplification. Typically, but not necessarily, amplification conditions can include thermocycling; in some embodiments, amplification conditions include a plurality of cycles where the steps of annealing, extending and separating are repeated. Typically, the amplification conditions include cations such as Mg²⁺ or Mn²⁺ and can also include various modifiers of ionic strength.

[0060] As defined herein “multiplex amplification” refers to selective and non-random amplification of two or more target sequences within a sample using at least one target-specific primer. In some embodiments, multiplex amplification is performed such that some or all of the target sequences are amplified within a single reaction vessel. The “plexy” or “plex” of a given multiplex amplification refers generally to the number of different target-specific sequences that are amplified during that single multiplex amplification. In some embodiments, the plexy can be about 12-plex, 24-plex, 48-plex, 96-plex, 192-plex, 384-plex, 768-plex, 1536-plex, 3072-plex, 6144-plex or higher. It is also possible to detect the amplified target sequences by several different methodologies (e.g., gel electrophoresis followed by densitometry, quantitation with a bioanalyzer or quantitative PCR, hybridization with a labeled probe; incorporation of biotinylated primers followed by avidin-enzyme conjugate detection; incorporation of ³²P-labeled deoxynucleotide triphosphates into the amplified target sequence).

[0061] As used herein, the term “amplification site” refers to a site in or on an array where one or more amplicons can be generated. An amplification site can be further configured to contain, hold or attach at least one amplicon that is generated at the site.

[0062] As used herein, the term “array,” “analyte array,” and “microarray” are used interchangeably and refer to a population of sites that can be differentiated from each other according to relative location. Different molecules that are at different sites of an array can be differentiated from each other according to the locations of the sites in the array. An individual site of an array can include one or more molecules of a particular type. For example, a site can include a single target nucleic acid molecule having a particular sequence or a site can include several nucleic acid molecules having the same sequence (and/or complementary sequence, thereof). The sites of an array can be different features located on the same substrate. Exemplary features include without limitation, droplets, wells in a substrate, beads (or other particles) in or on a substrate, projections from a substrate, ridges on a substrate or channels in a substrate. The sites of an array can be separate substrates each bearing a different molecule. Different molecules attached to separate substrates can be identified according to the locations of the substrates on a surface to which the substrates are associated or according to the locations of the substrates in a liquid or gel. Exemplary arrays in which separate substrates are located on a surface include, without limitation, those having beads in wells.

[0063] As used herein, the term “compartment” is intended to mean an area or volume that separates or isolates something from other things. Exemplary compartments include, but are not limited to, vials, tubes, wells, droplets, boluses, beads, vessels, surface features, flow cell, or areas or volumes separated by physical forces such as fluid flow, magnetism, electrical current or the like. In one embodiment, a compartment is a well of a multi-well plate, such as a 96- or 384-well plate. As used herein, a droplet may include a hydrogel bead, which is a bead for encapsulating one or more nuclei or cell, and includes a hydrogel composition. In some embodiments, the droplet is a homogeneous droplet of hydrogel material or is a hollow droplet having a polymer hydrogel shell. Whether homogenous or hollow, a droplet may be capable of encapsulating one or more nuclei or cells. In some embodiments, the droplet is a surfactant stabilized droplet. In some embodiments, a single cell or Nuclei is present per compartment. In some embodiments, two or more cells or Nuclei are present per compartment. In some embodiments, each compartment contains a compartment-specific index. In some embodiments, the index is in solution or attached or associated with a solid-phase in each compartment.

[0064] The term “flow cell” as used herein refers to a chamber comprising a solid surface across which one or more fluid reagents can be flowed. Examples of flow cells and related fluidic systems and detection platforms that can be readily used in the methods of the present disclosure are described, for example, in Bentley et al., Nature 456:53-59 (2008), WO 04/018497; U.S. Pat. No. 7,057,026; WO 91/06678; WO 07/123744; U.S. Pat. Nos. 7,329,492; 7,211,414; 7,315,019; 7,405,281, and US 2008/0108082.

[0065] As used herein, the term “clonal population” refers to a population of nucleic acids that is homogeneous with respect to a particular nucleotide sequence. The homogenous sequence is typically at least 10 nucleotides long, but can be even longer including for example, at least 50, 100, 250, 500 or 1000 nucleotides long. A clonal population can be derived from a single target nucleic acid or template nucleic acid. Typically, all of the nucleic acids in a clonal population will have the same nucleotide sequence. It will be understood that a small number of mutations (e.g., due to amplification artifacts) can occur in a clonal population without departing from clonality.

[0066] As used herein, a “pattern of cytosine modification,” also referred to as a “methylation profile,” refers to the pattern with which both methylation and unmethylation of cytosines is distributed in the genome of a cell or an organism. A “pattern” is inclusive of both modified cytosines and non-modified cytosines. The pattern can be defined in several distribution dimensions: by organ, by tissue, by status of disease or pathological condition (e.g., cancer, neurophysiological), by genome segment (e.g., chromosome or genetic coordinates on a chromosome), by gene, by CpG island, a group of cytosines, or by the site of a modified cytosine. A pattern of cytosine modification can have a known correlation with a disease or pathological condition, or correlation of a pattern of cytosine modification with a disease or pathological condition can be identified using methods described herein. A pattern of cytosine modification can be present at a specific locus (e.g., location) in a genome, and that specific location can be a single modified cytosine or a set of modified cytosines, e.g., a CpG island. A pattern of cytosine modification can be identified by using a predetermined sequence, e.g., a method of using an altered cytidine deaminase can be designed and practiced with the intent of determining a pattern of cytosine modification, for instance, the methylation status of one of more specific cytosines, the methylation status of one or more specific cytosines present at a specific location of a genome, or the combination thereof.

[0067] As used herein, the term “each,” when used in reference to a collection of items, is intended to identify an individual item in the collection but does not necessarily refer to every item in the collection unless the context clearly dictates otherwise.

[0068] As used in this specification and the appended claims, the term “or” is generally employed in its sense including “and/or” unless the content clearly dictates otherwise. The term “and/or” means one or all of the listed elements or a combination of any two or more of the listed elements. The use of “and/or” in some instances does not imply that the use of “or” in other instances may not mean “and/or.”

[0069] Unless otherwise specified, “a,” “an,” “the,” and “at least one” are used interchangeably and mean one or more than one.

[0070] As used in this specification and the appended claims, the term “or” is generally employed in its sense including “and/or” unless the content clearly dictates otherwise. The term “and/or” means one or all of the listed elements or a combination of any two or more of the listed elements. The use of “and/or” in some instances does not imply that the use of “or” in other instances may not mean “and/or.”

[0071] The words “preferred” and “preferably” refer to embodiments of the disclosure that may afford certain benefits, under certain circumstances. However, other embodiments may also be preferred, under the same or other circumstances. Furthermore, the recitation of one or more preferred embodiments does not imply that other embodiments are not useful, and is not intended to exclude other embodiments from the scope of the disclosure.

[0072] As used herein, “have,” “has,” “having,” “include,” “includes,” “including,” “comprise,” “comprises,” “comprising” or the like are used in their open ended inclusive sense, and generally mean “include, but not limited to,” “includes, but not limited to,” or “including, but not limited to.”

[0073] It is understood that wherever embodiments are described herein with the language “have,” “has,” “having,” “include,” “includes,” “including,” “comprise,” “comprises,” “comprising” and the like, otherwise analogous embodiments described in terms of “consisting of” and/or “consisting essentially of” are also provided. The term “consisting of” means including, and limited to, whatever follows the phrase “consisting of.” That is, “consisting of” indicates that the listed elements are required or mandatory, and that no other elements may be present. The term “consisting essentially of” indicates that any elements listed after the phrase are included, and that other elements than those listed may be included provided that those elements do not interfere with or contribute to the activity or action specified in the disclosure for the listed elements.

[0074] Conditions that are “suitable” for an event to occur, such as converting 5 methylcytosine to thymidine by deamination, or “suitable” conditions are conditions that do not prevent such events from occurring. Thus, these conditions permit, enhance, facilitate, and/or are conducive to the event.

[0075] As used herein, “providing” in the context of a protein, sample of DNA or RNA, or composition means making the protein, sample of DNA or RNA, or composition, purchasing the protein, sample of DNA or RNA, or composition, or otherwise obtaining the protein, sample of DNA or RNA, or composition.

[0076] Reference throughout this specification to “one embodiment,” “an embodiment,” “certain embodiments,” or “some embodiments,” etc., means that a particular feature, configuration, composition, or characteristic described in connection with the embodiment is included in at least one embodiment of the disclosure. Thus, the appearances of such phrases in various places throughout this specification are not necessarily referring to the same embodiment of the disclosure. Furthermore, the particular features, configurations, compositions, or characteristics may be combined in any suitable manner in one or more embodiments.

[0077] While polynucleotide sequences encoding an altered cytidine deaminase are described herein as DNA sequences, it is understood that the complements, reverse sequences, and reverse complements of the DNA sequences can be easily determined by the skilled person. It is also understood that the sequences described herein as DNA sequences can be converted from a DNA sequence to an RNA sequence by replacing each thymidine nucleotide with a uracil nucleotide.

[0078] Throughout this disclosure, various aspects of the disclosure can be presented in a range format. It should be understood that the description in range format is merely for convenience and brevity and should not be construed as an inflexible limitation on the scope of the disclosure. Accordingly, the description of a range should be considered to have specifically disclosed all the possible subranges as well as individual numerical values within that range. For example, description of a range such as from 1 to 6 should be considered to have specifically disclosed subranges such as from 1 to 3, from 1 to 4, from 1 to 5, from 2 to 4, from 2 to 6, from 3 to 6 etc., as well as individual numbers within that range, for example, 1, 2, 2.7, 3, 4, 4.5, 5, 5.3, and 6. This applies regardless of the breadth of the range.

[0079] In the description herein particular embodiments may be described in isolation for clarity. Unless otherwise expressly specified that the features of a particular embodiment are incompatible with the features of another embodiment, certain embodiments can include a combination of compatible features described herein in connection with one or more embodiments.

### Methyltransferases and Cytosine Methyltransferases

[0080] In one aspect, the present disclosure relates to the use of a methyltransferase with a derivative of SAM to transform unmodified Cs with a carboxymethyl functional group, creating an enzymatically modified cytosine base in target DNA molecules. Advantageously, methods of the present disclosure use an enzyme-based method of detecting modified C separately from unmodified C. Reacting target DNA with a methyltransferase and a derivative of SAM can convert the unmodified CpG into protected C, such as carboxy-C.

[0081] Accordingly, the present disclosure relates to methyltransferases, sometimes referred to herein as “MTx.” Methyltransferases catalyze addition of a methyl group from a donor, such as a cofactor, to a substrate, typically a biological substrate such as a nucleic acid or an amino acid. In some embodiments, a methyltransferase of the present disclosure is a cytosine-specific methyltransferase, sometimes referred to herein as a “cMTx” or a cytosine-specific DNA methyltransferase. Cytosine methylation in genomic DNA often modulates gene expression and repression. In vivo, cytosines methylation typically occurs enzymatically and is catalyzed by a cytosine-specific methyltransferase. Many cytosine-specific methyltransferases exist across all domains of life. Some cytosine-specific methyltransferases transfer a methyl group from SAM to cytosine, often at the 5 position (FIG. 2B). Methylated cytosines are common across the human genome and can typically serve as substrates for DNA-modifying enzymes, such as cytosine deaminases.

[0082] Some methyltransferases may catalyze the transfer of groups other than methyl groups to a substrate. In particular, some methyltransferases can catalyze transfer of a methyl group attached to an additional group. In one or more embodiments, a methyltransferase of the present disclosure can catalyze transfer of a methylene group attached to an additional group, such as a protective group, to a cytosine. In one or more embodiments, a methyltransferase of the present disclosure is a carboxy-methyltransferase, meaning that the methyltransferase catalyzes the transfer of a carboxymethyl group. To catalyze the transfer of an additional group (e.g., a carboxymethyl group), the additional group must be catalytically compatible with the methyltransferase.

[0083] Some naturally-occurring methyltransferases may be able to catalyze transfer of a methylene group attached to an additional group. Thus, in one or more embodiments, a methyltransferase of the present disclosure is a naturally-occurring methyltransferase, also referred to as an unaltered methyltransferase. In one or more embodiments, the methyltransferase is an unaltered cytosine-specific methyltransferase.

[0084] In one or more embodiments, the methyltransferase of the present disclosure is an altered methyltransferase, such as an altered cytosine-specific methyltransferase. In one or more embodiments, the methyltransferase of the present disclosure is an altered cytosine-specific methyltransferase. In one or more embodiments, the methyltransferase is altered to include one or more components for purification or isolation of the methyltransferase, such as an affinity tag. In one or more embodiments, the methyltransferase may be engineered or altered to accommodate a substrate larger than a methyl group. In particular, the active site of a methyltransferase may be altered to accommodate a methylene group attached to an additional group. An altered methyltransferase includes one or more mutations, deletions, or insertions to its amino acid sequence. Methods of introducing such alterations are known to the art and described in greater detail herein. A methyltransferase may be altered using any suitable molecular biology technique, such as molecular cloning.

[0085] The bacterial CpG methyltransferase M.MpeI (SEQ ID NO: 140) has been shown to be useful in the study of mammalian genome modifications because it targets the same sequence contexts commonly observed with mammalian genome modifications (Wojciechowski et al., “CpG underrepresentation and the bacterial CpG-specific DNA methyltransferase M.MpeI,” PNAS 110 (1) 105-110 (2013)). M.MpeI employs a canonical cytosine DNA methyltransferase mechanism to convert unmodified C to 5mC. M.MpeI acts in a non-CpG sequence context including “CCWGG.” wherein “W” is adenine or thymine.

[0086] Interestingly, variants of M.MpeI are capable of transferring groups other than methyl groups to cytosine upon mutation to the active site. One variant of M.MpeI includes mutation of asparagine at position 374 to arginine (N374R, SEQ ID NO:141). A second variant of M.MpeI includes mutation of asparagine at position 374 to lysine (N374K, SEQ ID NO:142). Each of these mutations has been shown to increase the ability of M.MpeI to use carboxy-S-adenosyl-L-methionine (carboxy-SAM) as a substrate. When these M.MpeI variants were incubated with DNA including unmodified C and carboxy-SAM, each variant transferred the carboxymethyl group to C at a higher rate than wild-type M.MpeI (Kohli, US Pat. App. Pub. US2023/0183793A1, incorporated by reference herein in its entirety).

[0087] In one or more embodiments, a methyltransferase of the present disclosure includes a mutation at a position functionally equivalent to N374 in SEQ ID NO: 140 to an amino acid other than asparagine. In one or more embodiments, the mutation at a position functionally equivalent to N374 is a mutation to a positively-charged amino acid. In one or more embodiments, a methyltransferase of the present disclosure includes a mutation at a position functionally equivalent to N374 in SEQ ID NO:140 to arginine. In one or more embodiments, a methyltransferase of the present disclosure includes a mutation at a position functionally equivalent to N374 in SEQ ID NO: 140 to lysine.

[0088] Notably, methyltransferases may be unable to add a protective group X (and thus may be unable to add the first protective group) to modified cytosine, particularly cytosine already having a modification at the 5 position. In one or more embodiments, the methyltransferase may exhibit low or no activity on modified C. In one or more embodiments, the methyltransferase may exhibit low or no activity on 5mC, 5hmC and/or any mC derivatives in the target nucleic acid. For example, the methyl group of 5mC may inhibit addition of the X to the 5 position of the mC, because the methyl group already occupies that location. Similarly, the hydroxymethyl group of any hmC may inhibit addition of X to the 5 position of the hmC; the formyl group of any fC may inhibit addition of X to the 5 position of the fC; and the carboxyl group of any caC may inhibit addition of X to the 5 position of the caC.

[0089] While methods of treating nucleic acids with methyltransferases are known to the art, the present disclosure presents methods of using methyltransferases in combination with altered cytosine deaminases (ACDs) to result in superior detection of complex nucleotide modifications. By using a methyltransferase to enzymatically protect unmodified C from deamination by an ACD, the activity of the ACD on multiple differently modified C (e.g., 5mC, 5hmC) can be individually detected. For example, dividing a sample into multiple aliquots and separately treating each aliquot with an ACD having a different substrate preference may result in detection of multiple C modifications in a single sample. For example, a sample may be treated with a methyltransferase to protect unmodified C, after which aliquots of the protected sample can be treated with (1) a 5mC-selective ACD and (2) a 5mC- and 5hmC-preferring ACD. By separately sequencing the first and second aliquots, 5mC and 5hmC can separately be detected in the sample.

[0090] In addition, treating a sample with a methyltransferase may advantageously reduce the rate of false positive identification of modified cytosine. While ACDs can be engineered to exhibit preference towards modified C, some ACDs can retain some level of activity to unmodified C. By making unmodified C catalytically inaccessible, the activity of an ACD toward modified C can be exploited.

[0091] While described herein in the context of M.MpeI methyltransferase, it is anticipated that similar approaches could be compatible with related methyltransferases. In one or more embodiments, a methyltransferase of the present disclosure is an altered methyltransferase from bacteria. In one or more embodiments, a methyltransferase of the present disclosure is an altered methyltransferase from archaea. In one or more embodiments, a methyltransferase of the present disclosure is an altered methyltransferase from a eukaryote, such as a mammal. Additional methyltransferases and methods of use are described in PCT Pub. No. WO 21/236778, incorporated by reference herein in its entirety.

### SAM and XSAM Cofactors

[0092] In another aspect, the present disclosure relates to compositions, kits, and methods including a cofactor. In one or more embodiments, the cofactor is a SAM analog, referred to herein as “XSAM”, wherein “X” includes a protective group and a methylene group via which the first protective group is coupled to the sulfonium ion. In nonlimiting examples, the protective group may include an alkyne group, a carboxyl group, an amino group, a hydroxymethyl group, an isopropyl group, or a dye. In one or more embodiments, the XSAM, having a sulfonium-bound first protective group and methylene group, may serve as a surrogate cofactor in place of SAM, having a sulfonium-bound methyl group. In embodiments including an XSAM, the methyltransferase may covalently deposit the methylene group with the protective group coupled thereto at the 5 position of any unmethylated C in the target nucleic acid, forming 5XC. During action of the methyltransferase, a composition may be formed that includes the polynucleotide, the XSAM, and the methyltransferase enzyme adding X from the XSAM to C in the polynucleotide. It will be appreciated that a suitable amount of the methyltransferase and XSAM may be mixed with the polynucleotide in an extracellular liquid. For example, XSAM is typically a stoichiometric reagent, so at least as much XSAM may be added to equal or exceed the predicted number of unmodified cytosines in a genomic sample. In one or more embodiments, XSAM may be added in at least a 2-fold excess, a 3-fold excess, a 4-fold excess, a 5-fold excess, a 10-fold excess, or a 100-fold excess relative to the predicted number of unmodified cytosines in the sample.

[0093] Following protection of the C in the target nucleic acid, the mC and/or any of its derivatives may be deaminated, e.g., using a cytidine deaminase enzyme, such as the ACDs herein. In this regard, although the protective group may be selected so as to fit within the methyltransferase enzyme and thus may be compatible with activity of the methyltransferase, the protective group may inhibit activity of the cytidine deaminase enzyme. Additionally, the formyl group of any fC may inhibit activity of the cytidine deaminase enzyme, and the carboxyl group of any caC may inhibit activity of the cytidine deaminase enzyme. In comparison, the methyl group of mC and the hydroxymethyl group of hmC may be compatible with activity of the cytidine deaminase enzyme. As such, fC and caC may not be deaminated by the cytidine deaminase enzyme, while mC may be deaminated to form T and hmC may be deaminated to form hT.

[0094] In one or more embodiments, a sample is treated with a cytosine methyltransferase and a cofactor and subsequently treated with a cytidine deaminase, such as an altered cytidine deaminase. Treatment with a methyltransferase prior to treatment with a cytidine deaminase may advantageously reduce the number of unmodified cytosines deaminated by the cytidine deaminase. For example, the methyltransferase may install a moiety that prevents the cytidine deaminase from acting on the unmodified cytosine. Preferably, the moiety still allows the cytosine to be interpreted as cytosine during sequencing, such as sequencing by synthesis.

### Altered Cytidine Deaminases (ACDs)

[0095] Described herein are altered cytidine deaminases (ACDs, or the singular form ACD) and methods for using the ACDs for mapping modified cytosines. In one or more embodiments, the ACDs are used in combination with the methyltransferases and/or cofactors described herein. Preferably, a sample is treated with an altered cytidine deaminase following treatment with a methyltransferase described herein. In some embodiments, the ACDs are used in one-step, enzymatic methods for mapping modified cytosines, such as 5mC, at single base resolution. The working examples provided herein describe ACDs based on APOBEC3A, and it is expected that other APOBEC proteins, modified as described herein, can be used.

[0096] Wild type APOBEC3A deaminates cytosine (C), 5 methyl cytosine (5mC), and 5-hydroxymethyl cytosine (5hmC) efficiently in single-stranded DNA (FIG. 1A-C). Treatment of DNA, such as genomic DNA, with wild type APOBEC3A results in the conversion of C to uracil (U), 5mC to thymidine (T), and 5hmC to 5-hydroxyuracil (5hmU) and reduces the complexity of the DNA to three bases for sequencing (FIG. 1D). Point mutations in human APOBEC3A proteins were produced in previous analyses and the ability of the mutant APOBEC3A proteins to convert cytosine to uracil was determined. Modification of the tyrosine residue at position 130 to alanine (Y130A) consistently resulted in an APOBEC protein with no activity (see FIG. 6c of Bulliard et al., 2011, J Virol., 85 (4): 1765-1776, and FIG. 5a of Shi et al., 2017, Nat Struct Mol Biol., 24 (2): 131-139). Proceeding contrary to Bulliard and Shi, it was discovered that certain mutations at position 130 of APOBEC3A alter the enzyme's rate of deamination on 5mC compared to C substrates. (International Application Publication WO 2023/196572).

[0097] The cognate tyrosine (Y) at position 130 was individually mutated to all possible canonical amino acid substitutions, including A, C, D, E, F, G, H, I, K, L, M, N, P, Q, R, S, T, V, and W, and evaluated for activity on C, 5mC, and 5hmC substrates. A separate APOBEC3A mutants containing a tyrosine to alanine point mutation in position 130 (Y130A) were found to preferentially deaminate 5mC instead of C (5mC was converted to T at a greater rate than C was converted to U) and an APOBEC3A mutant containing a tyrosine to leucine point mutation in position 130 (Y130L) was found to preferentially deaminate C instead of 5mC (C was converted to U at a greater rate than 5mC was converted to T). The deamination of 5mC to T leads to C to T mutations which can be identified by standard sequencing methods. As a result, the treatment of DNA with an ACD of the present disclosure preferentially converts 5mC to thymidine (FIG. 1E). An ACD having this activity is referred to herein as having “5mC-preferring activity,” “cytosine-defective deaminase activity” or “5mC selective deaminase activity”, where the terms are used interchangeably Analysis of the sample DNA after treatment with the modified cytidine deaminase described herein, for example, by sequencing of the sample DNA, and optional comparison to a reference (e.g., reference sequence) permits easy identification of C to T point mutations, and these point mutations are inferred as 5mC positions.

[0098] A second mutation at Y132 increased the activity of an APOBEC3A mutant containing Y130A to preferentially deaminate 5mC instead of C (5mC was converted to T at a greater rate than C was converted to U) compared to the same APOBEC protein containing one substitution mutation at Y130. In one embodiment, the substitution mutation at the second position is histidine (H), such as a tyrosine to histidine point mutation at position 132 (Y132H).

[0099] In another example, an APOBEC3A mutant containing a tyrosine to tryptophan point mutation in position 130 (Y130W) maintained the ability to deaminate C and 5mC to U and T, respectively, but lost the ability to deaminate 5hmC, 5fC, and 5caC. When the sequence of the nucleic acid exposed to this APOBEC3A mutant is determined, C and 5mC are deaminated to U and T, respectively, and are read out as T by a sequencer. On the other hand, 5hmC is not deaminated by the APOBEC3A mutant and is read out as a C. (FIG. 1F).

[0100] Although an engineered APOBEC3A having the point mutations Y130A and Y132H has high selectivity towards 5mC, C deamination can start to occur when 5mC in the reaction mixture is close to completely reacted. For instance, under some conditions an undesirable increase in the deamination of C occurs after approximately 75% of the 5mC in a sample is deaminated (data not shown). In a typical Next Generation Sequencing run, C deamination results in a false positive signal, decreasing the accuracy of 5mC base callout.

[0101] The inventors have discovered that the selectivity of APOBEC3A mutants containing substitution mutations that preferentially deaminate 5mC over C can be further modified to enhance the preference of the enzyme. Modification of the aspartic acid residue at position 133 to tryptophan (D133W) or to cysteine (D133C) in an ACD with enhanced selectivity for 5mC resulted in an ACD with further enhancement of the selectivity for 5mC compared to the same protein without the mutation at D133

[0102] Also disclosed herein are surprising and unexpected mutations found during screening that alter the selectivity of ACDs. In one example, an APOBEC3A mutant containing a tyrosine to tryptophan point mutation in position 130 (Y130W) maintained the ability to deaminate C and 5mC to U and T, respectively, but lost the ability to deaminate 5hmC. When the sequence of a nucleic acid exposed to this APOBEC3A mutant is determined, C and 5mC are deaminated to U and T, respectively, and are read out as T by a sequencer. On the other hand, 5hmC is not deaminated by the APOBEC3A mutant and is read out as a C (FIG. 1F). This activity is referred to herein as 5hmC-defective deaminase activity and 5hmC-deficient activity. 5fC and 5caC are also not deaminated by this APOBEC3A mutant, and therefore cannot be distinguished from 5hmC. However, the abundance of 5fC and 5caC is orders of magnitude lower than 5hmC in human genomic DNA, approaching the detection limit of mass spectrometers used for such measurements (Ito et al., 2011, Science 333, 1300-1303 (2011); Wagner et al., 2015, Angew. Chem. Int. Edn Engl. 54, 12511-12514 (2015); Bachman et al., 2015, Nat. Chem. Biol. 11, 555-557 (2015)). Therefore, signals from 5fC and 5caC should be insignificant compared to 5hmC.

[0103] In another example, mutation of D133 to valine (D133V) modified the substrate selectivity of an ACD. In particular, a dimerized ACD having a modification of the tyrosine at 130 to alanine (Y130A), a modification of the tyrosine at 132 to histidine (Y132H) and a modification of D133 to valine (D133V) exhibited equal activity on both 5mC and 5hmC (see Examples 14-18). Accordingly, the present disclosure includes an ACD that converts 5-hydroxymethyl cytosine (5hmC) to 5-hydroxymethyl uracil (5hmU) by deamination and 5-methyl cytosine (5mC) to thymidine (T) by deamination, where the rate of deamination of 5mC and 5hmC is greater than the rate of conversion of cytosine (C) to uracil (U) by deamination (FIG. 1I). This activity is referred to herein as “5mC- and 5hmC-preferring activity.” As described herein, an ACD having 5mC- and 5hmC-preferring activity can be present as a monomer or present as a dimer. When present as a dimer, one ACD of a dimer can be have 5mC- and 5hmC-preferring activity, or both ACDs of a dimer can be have 5mC- and 5hmC-preferring activity.

[0104] The inventors also identified a surprising and unexpected set of mutations at Y130, Y132, and D133 that modified the substrate selectivity of an ACD. In particular, ACDs having a modification of the tyrosine at 130 to aspartic acid (Y130D), a modification of the tyrosine at 132 to histidine, arginine, or lysine (Y132X, wherein X is H, R, or K), and a modification of the aspartic acid at 133 to alanine, glycine, serine, or threonine (D133Z, where Z is A, G, S, or T) exhibited a strong 5hmC preference (see Example 19). Accordingly, the present disclosure includes an ACD that converts 5hmC to 5hmU by deamination at a rate that is greater than the rate of conversion of C to U and 5mC to T by deamination (FIG. 1H). This activity is referred to herein as “5hmC-preferring activity.”

[0105] The introduction of a selectivity-enhancing mutation like D133W was found to reduce the thermal melting point of ACDs that also included a substitution mutation at Y130, at Y132, or at both Y130 and Y132. Reasoning that the multiple introduced substitution mutations weakened protein folding and caused the observed thermal instability, the inventors have discovered that modification of certain amino acids increased stability of APOBEC proteins. Examples of these stability-enhancing alterations and deletions are described in Table 4, 5, 6, 7, and 8. For instance, modification of the arginine residue at position 74 to leucine (R74L) in an ACD containing the Y130A/Y132H/D133W mutations resulted in an ACD with increased stability compared to the same protein without the R74L mutation, and retained the enhanced selectivity for 5mC conferred by the D133W substitution mutation. Selectivity-modifying alterations, such as selectivity-enhancing mutations (e.g., D133W and other selectivity-enhancing alterations) and stability-enhancing mutations (e.g., R74L and other stability-enhancing alterations) are described in detail herein and can be combined in combination to provide selectivity-enhanced cytosine deaminases, optionally with increased stability.

[0106] Provided herein are altered cytidine deaminases (ACDs), compositions including an ACD, methods of using an ACD, and kits that include an ACD. A cytidine deaminase is considered to be an altered cytidine deaminase (ACD) if it has an activity that selectively deaminates C, 5mC, and/or 5hmC, and includes at least one of the alterations (e.g., substitution mutations, insertions, and/or deletions) described herein. The present disclosure provides multiple types of ACDs. One type of ACD preferentially deaminates 5mC instead of C (i.e., converts 5mC to T at a greater rate than converting C to U) compared to the equivalent wild-type enzyme (has “5mC-preferring activity”). Another type of ACD converts C to U and 5mC to T by deamination where the rate of deamination of C and 5mC is greater than the rate of conversion of 5hmC to 5hmU by deamination (has “5hmC-deficient activity”). The present disclosure provides ACDs that converts 5hmC to 5hmU and 5mC to T by deamination, where the rate of deamination of 5mC and 5hmC is greater than the rate of conversion of C to U by deamination (has “5mC- and 5hmC-preferring activity”). Another type of ACD converts 5hmC to 5hmU by deamination where the rate of deamination of 5hmC is greater than the rate of conversion of C to U and 5mC to T by deamination (has “5hmC-preferring activity.”) Unless the context indicates otherwise, reference to an ACD includes ACDs having 5mC-preferring activity, ACDs having 5hmC-deficient activity, ACDs having 5mC- and 5hmC-preferring activity, and ACDs having 5hmC-preferring activity.

[0107] ACDs include apolipoprotein B mRNA editing enzymes, catalytic polypeptide-like (APOBEC) and activation induced cytidine deaminase (AID). Wild-type APOBEC and AID cytidine deaminases have the activity of deaminating cytidine (C) of DNA and/or RNA to form uridine (U). An ACD of the present disclosure has an altered rate of deamination of C, 5mC, and/or 5hmC when compared to the wild-type enzyme. A cytidine deaminase of the present disclosure can be referred to herein as an “altered cytidine deaminase,” “recombinant cytidine deaminase,” “ACD,” “recombinant ACD,” “mutant cytidine deaminase,” or “modified cytidine deaminase” and refers to any of the engineered ACDs described herein that comprise one or more changes from a reference (i.e., wild-type) amino acid sequence that provide one or more of the activities described herein, including but not limited to an altered deamination profile, e.g., alters its ability to preferentially deaminate one form of cytosine over another, enhanced selectivity for 5mC or C, and/or enhanced stability.

[0108] Whether a protein has cytidine deaminase activity may be determined by in vitro assays. On example of an in vitro assay is based on digestion with the restriction enzyme SwaI (see Example 1 of International Application Publication WO 2023/196572). A protein that can deaminate 5mC to thymidine has cytidine deaminase activity.

[0109] An ACD having 5mC-preferring activity can have a catalytic efficiency that is at least 10-fold, at least 50-fold, or at least 100-fold higher on 5mC than C substrates. In one embodiment, an ACD that preferentially deaminates 5mC instead of C can have a catalytic efficiency that is no greater than 1500-fold higher on 5mC than C substrates.

[0110] In an ACD that deaminates C and 5mC to U and T, respectively, and has significantly reduced deamination of 5hmC (i.e., has 5hmC-defective deaminase activity), the deamination of 5hmC by the ACD

[0111] An ACD having 5hmC-deficient activity, 5mC- and 5hmC-preferring activity, or 5hmC-preferring activity can have a catalytic efficiency that is at least 10-fold, at least 20-fold, at least 30-fold, at least 40-fold, at least 50-fold, or at least 100-fold higher on C than 5mC substrates. In some embodiments, the C-selective ACD has at least 10-fold, 20-fold, 30-fold, 40-fold, 50-fold, 60-fold, 70-fold, 80-fold, 90-fold, 100-fold, 110-fold, 120-fold, 130-fold, 140-fold, 150-fold, 160-fold, 170-fold, 180-fold, 190-fold, 200-fold, 210-fold, 220-fold, 230-fold, 240-fold, 250-fold, 260-fold, 270-fold, 280-fold, 290-fold, 300-fold, 320-fold, 340-fold, 360-fold, 380-fold, 400-fold, 425-fold, 450-fold, 475-fold, 500-fold, 525-fold, 550-fold, 575-fold, 600-fold, 700-fold, 800-fold, 900-fold, 1000-fold higher activity, including ranges and amounts in between. In one embodiment, an ACD can have a catalytic efficiency that is no greater than 1500-fold high activity.

[0112] An ACD having 5mC-preferring deaminase activity can have deamination of C, deamination of 5hmC, or deamination of both C and 5hmC by the ACD reduced by at least 60%, more preferably at least 80%, at least 85%, at least 90%, at least 95%, at least 98% or at least 99% compared to the wild type cytidine deaminase. In one embodiment, the deamination of C and/or 5hmC by an ACD disclosed herein is undetectable using an assay such as the SwaI-based assay (International Application No. PCT/US2023/017846).

[0113] An ACD having 5hmC-defective deaminase activity can have deamination of 5hmC by the ACD reduced by at least 60%, more preferably at least 80%, at least 85%, at least 90%, at least 95%, at least 98% or at least 99% compared to a wild-type cytidine deaminase, e.g., SEQ ID NO:3. In one embodiment, the deamination of 5hmC by an ACD disclosed herein is undetectable using an assay such as the SwaI-based assay (International Application No. PCT/US2023/017846).

[0114] An ACD having 5mC- and 5hmC-preferring activity can have deamination C by the ACD reduced by at least 60%, more preferably at least 80%, at least 85%, at least 90%, at least 95%, at least 98% or at least 99% compared to a wild-type cytidine deaminase, e.g., SEQ ID NO: 3. In one embodiment, the deamination of C by an ACD disclosed herein is undetectable using an assay such as the SwaI-based assay (International Application No. PCT/US2023/017846).

[0115] An ACD having 5hmC-preferring activity can have deamination C and deamination of 5mC by the ACD reduced by at least 60%, more preferably at least 80%, at least 85%, at least 90%, at least 95%, at least 98% or at least 99% compared to a wild-type cytidine deaminase, e.g., SEQ ID NO:3. In one embodiment, the deamination C and deamination of 5mC by an ACD disclosed herein are undetectable using an assay such as the SwaI-based assay (International Application No. PCT/US2023/017846).

[0116] In certain embodiments, an ACD of the present disclosure is based on a member of the APOBEC protein family. An ACD of the present disclosure that is “based on” a member of the APOBEC protein family means the ACD is an APOBEC protein that includes one or more of the substitution mutations described herein as compared to a reference APOBEC sequence. An ACD of the present disclosure that is “based on” a member of the APOBEC protein family can also include conservative and/or nonconservative mutations as described herein. The positions of the alterations, substitutions or deletions will be at functionally equivalent amino acids from the APOBEC A3 reference sequence, as described herein.

[0117] The APOBEC protein family includes subfamilies AID, APOBEC1, APOBEC2, APOBEC3 (including 3A, 3B, 3C, 3D, 3F, 3G, 3H), and APOBEC4. An ACD of the present disclosure can be based on a member of the AID subfamily, the APOBEC1 subfamily, the APOBEC2 subfamily, the APOBEC3 subfamily (e.g., the 3A subfamily, the 3B subfamily, the 3C subfamily, the 3D subfamily, the 3F subfamily, the 3G subfamily, or the 3H subfamily), or the APOBEC4 subfamily. An ACD of the present disclosure can be based on a member of the APOBEC protein family from a vertebrate, such as a mammal. Examples of mammals include, but are not limited to, rodents, primates, rabbit, bovine (e.g., cow), porcine (e.g., pig), equine (e.g., horse), elephant, and aardvark. An example of a primate is a human and a chimpanzee.

[0118] The APOBEC protein family is a member of the large cytidine deaminase superfamily that contains a canonical zinc-dependent deaminase (ZDD) signature motif embedded within a core cytidine deaminase fold. This fold includes a five-stranded mixed beta (b)-sheet surrounded by six alpha (a)-helices with the order a1-b1-b2-a2-b3-a3-b4-a4-b5-a5-a6 (Salter et al., Trends Biochem Sci. 2016 41 (7): 578-594. Doi: 10.1016/j.tibs.2016.05.001; Salter et al., Trends Biochem. Sci. 2018, 43 (8): 606-622 doi.org/10.1016/j.tibs.2018.04.013). Each cytidine deaminase domain core structure of APOBEC proteins contains a highly conserved spatial arrangement of the catalytic center residues of a zinc-binding motif H-[P/A/V]-E-X [23-28]-P—C-X [2-4]-C (SEQ ID NO:12) (referred to herein as the ZDD motif, where X is any amino acid, and the subscript range of numbers after X refers to the number of amino acids) (Salter et al., Trends Biochem Sci. 2016 41 (7): 578-594. Doi: 10.1016/j.tibs.2016.05.001). Without intending to be limited by theory, the H and two C residues coordinate a Zn atom, and the E residue polarizes a water molecule near the Zn-atom for catalysis (Chen et al., 2021, Viruses, 13:497, doi.org/10.3390/v13030497).

[0119] Some members of the APOBEC protein family, e.g., the AID subfamily, the APOBEC1 subfamily, the APOBEC2 subfamily, the APOBEC3A subfamily, the APOBEC3C subfamily, the APOBEC3H subfamily, and the APOBEC4 subfamily, include one copy of the ZDD motif. Other members of the APOBEC protein family, e.g., the APOBEC3B subfamily, the APOBEC3D subfamily, the APOBEC3F subfamily, and the APOBEC3G subfamily, include two copies of the ZDD motif, but often only the C-terminal copy is active (Salter et al., Trends Biochem Sci. 2016 41 (7): 578-594. Doi: 10.1016/j.tibs.2016.05.001). Thus, an altered cytidine deaminase disclosed herein includes one or two ZDD motifs. In one embodiment, an altered cytidine deaminase based on a member of the APOBEC3A subfamily that includes the following ZDD motif: HXEX₂₄SW(S/T)PCX_{[2-4]}CX₆FX₈LX₅R(L/I)YX_{[8-11]}LX₂LX_{[10]}M (SEQ ID NO:13) (where X is any amino acid, and the subscript number or range of numbers after X refers to the number of amino acids) (Salter et al., Trends Biochem Sci. 2016 41 (7): 578-594. Doi: 10.1016/j.tibs.2016.05.001).

[0120] In one embodiment, an ACD disclosed herein is a member of the APOBEC3 subfamily, e.g., APOBEC3A, APOBEC3B, APOBEC3C, APOBEC3D, APOBEC3F, or APOBEC3G, and can include one or more highly conserved sites that are part of the active site and within the ZDD motif SEQ ID NO:12. The sites include tryptophan at position 98 and serine or threonine at position 99 of SEQ ID NO:3 (Kouno et al., 2017, Nat. Comm, 8:15024, DOI: 10.1038/ncomms15024).

[0121] In addition to the ZDD motif, a member of the APOBEC protein family also includes other highly conserved residues that are part of the active site but not present as part of the ZDD motif SEQ ID NO: 12. A member the APOBEC3A subfamily, APOBEC3B subfamily, APOBEC3C subfamily, APOBEC3D subfamily, APOBEC3F subfamily, and APOBEC3G subfamily typically includes one or more of the following highly conserved sites that are part of the active site: arginine at position 28; histidine, asparagine, or arginine at position 29; serine or threonine, preferably threonine, at position 31; asparagine or aspartic acid at position 57; histidine at position 70; cysteine at position 101; cysteine at position 106; tyrosine or phenylalanine at position 130; asparagine or tyrosine at position 131; asparagine, tyrosine, or phenylalanine, preferably tyrosine, at position 132; and arginine or lysine at position 189 of SEQ ID NO: 3 (Kouno et al., 2017, Nat. Comm, 8:15024, DOI: 10.1038/ncomms15024).

[0122] An ACD of the present disclosure includes a substitution mutation, deletion or insertion at one or more residues when compared to a reference cytidine deaminase. A substitution mutation can be at the same position or a functionally equivalent position compared to the reference cytidine deaminase. Reference cytidine deaminases and functionally equivalent positions are described in detail herein. As noted, positions of the altered amino acids described herein and in the tables are in reference to APOBECA3A (SEQ ID NO:3) but one skilled in the art is capable of deriving the functionally equivalent positions in the other referenced cytosine deaminases. The skilled person will readily appreciate that an altered cytidine deaminase described herein is not naturally occurring.

[0123] A reference cytidine deaminase can be a member of the APOBEC protein family. Essentially any known member of the APOBEC protein family can be a reference cytidine deaminase. The skilled person can easily identify members of each of the subfamilies by using a publicly available database such as the Protein database available at the National Center for Biotechnology Information (ncbi.nlm.nih.gov/protein) and searching for APOBEC1, APOBEC2, APOBEC3A, APOBEC3B, APOBEC3C, APOBEC3D, APOBEC3F, APOBEC3G, APOBEC3H, APOBEC4, or, when identifying members of the AID family, Activation-induced cytidine deaminase. A wild-type reference cytidine deaminase has the activity of binding single-stranded DNA (ssDNA) and deaminating a cytosine present on the ssDNA to convert it to uracil. In one embodiment, a wild-type reference cytidine deaminase has the activity of binding single-stranded RNA (ssRNA) and deaminating a cytosine present on the ssRNA to convert it to uracil. Methods for determining whether a protein binds ssDNA or ssRNA and deaminates a cytosine present are known to the skilled person.

[0124] In one embodiment, an ACD has an amino acid sequence that is based on a reference sequence which is a member of the APOBEC protein family includes a ZDD motif H-[P/A/V]-E-X_{[23-28]}-P-C-X_{[2-4]}-C (SEQ ID NO:12) and at least one substitution mutation disclosed herein. Optionally, an altered cytidine deaminase includes other active site residues disclosed herein. Non-limiting examples of reference cytidine deaminase proteins are shown in Table 1.

TABLE 1
Examples of members of the APOBEC protein subfamilies.

| APOBEC protein | |
|---|---|
| family | Non-limiting examples |
| AID | UniProt: Q9GZX7 (SEQ ID NO: 1); UniProt: G3QLD2 (SEQ ID |
| | NO: 37); UniProt: Q9WVE0 (SEQ ID NO: 38) |
| APOBEC1 | UniProt: P41238 (SEQ ID NO: 2); NCBI XP_030856728.1 (SEQ |
| | ID NO: 39); UniProt P51908 (SEQ ID NO: 40) |
| APOBEC2 | UniProt: Q9Y235 (SEQ ID NO: 4); UniProt G3SGN8 (SEQ ID |
| | NO: 41); UniProt Q9WV35 (SEQ ID NO: 42) |
| APOBEC3A | UniProt: P31941(SEQ ID NO: 3); GenBank: XP_045219544.1 |
| | (SEQ ID NO: 19) |
| | GenBank: AER45717.1 (SEQ ID NO: 20); GenBank: |
| | XP_003264816.1 (SEQ ID NO: 21); GenBank: PNI48846.1 (SEQ |
| | ID NO: 22); GenBank: ADO85886.1 (SEQ ID NO: 23) |
| APOBEC3B | UniProt: Q9UH17 (SEQ ID NO: 5); UniProt G3QV16 (SEQ ID |
| | NO: 43); UniProt F6M3K5 (SEQ ID NO: 44) |
| APOBEC3C | UniProt: Q9NRW3 (SEQ ID NO: 6); UniProt Q694B5 (SEQ ID |
| | NO: 45); UniProt B0LW74 (SEQ ID NO: 46) |
| APOBEC3D | UniProt: Q96AK3 (SEQ ID NO: 7); NCBI NP_001332895.1 (SEQ |
| | ID NO: 47); NCBI NP_001332931.1 (SEQ ID NO: 48) |
| APOBEC3F | UniProt: Q8IUX4 (SEQ ID NO: 8); UniProt G3RD21 (SEQ ID |
| | NO: 49); UniProt Q1G0Z6 (SEQ ID NO: 50) |
| APOBEC3G | UniProt: Q9HC16 (SEQ ID NO: 9); UniProt Q694C1 (SEQ ID |
| | NO: 51); UniProt U5NDB3 (SEQ ID NO: 52) |
| APOBEC3H | UniProt: Q6NTF7 (SEQ ID NO: 10); UniProt B7T0U7 (SEQ ID |
| | NO: 53); UniProt Q19Q52 (SEQ ID NO: 54) |
| APOBEC4 | UniProt: Q8WW27(SEQ ID NO: 11); NCBI XP_004028087.1 |
| | (SEQ ID NO: 55); UniProt Q497M3 (SEQ ID NO: 56) |

UniProt, database of protein sequence and functional information, available at uniprot.org; GenBank, collection of nucleotide sequences and their protein translations, available at ncbi.nlm.nih.gov/protein/.

[0125] In one embodiment, an ACD has an amino acid sequence that is based on a reference sequence that is a member of the APOBEC3A subfamily, and includes a ZDD motif HXEX₂₄SW(S/T)PCX_{[2-4]}CX₆FX₈LX₅R(L/I)YX_{[8-11]}LX₂LX_{[10]}M (SEQ ID NO:13) (where X is any amino acid, and the subscript number or range of numbers after X refers to the number of amino acids) and at least one substitution mutation disclosed herein. In one embodiment, the substitution mutation is a substitution mutation at the underlined tyrosine, such as a substitution mutation to alanine (A) or tryptophan (W). The underlined tyrosine (Y) of SEQ ID NO: 13 is the position functionally equivalent to the tyrosine amino acid 130 of the APOBEC3A protein SEQ ID NO: 3. Optionally, the altered cytidine deaminase includes other active site residues disclosed herein.

[0126] In one embodiment, the amino acid sequence of an ACD includes the amino acids of a member of the APOBEC3A subfamily: X_{[16-26]9}-GRXXTXLCYXV-X₁₅-GXXXN-X₁₂-HAEXXF-X₁₄-YXXTWXXSWSPC-X_{[2-4]}-CA-X₅-FL-X₇-LXIXXXR(L/I)Y-X₈-GLXXLXXXG-X₅-M-X₄-FXXCWXXFV-X₆-FXPW-X₁₃-LXXI-X_{[2-6]} (SEQ ID NO:14) (where X is any amino acid, and the subscript number or range of numbers after X refers to the number of amino acids), or a subset thereof, and at least one substitution mutation disclosed herein. The underlined tyrosine (Y) of SEQ ID NO: 14 is the position functionally equivalent to the tyrosine amino acid 130 of the APOBEC3A protein SEQ ID NO:3. In one embodiment, the substitution mutation is a substitution mutation at the underlined tyrosine, such as a substitution mutation to alanine (A) or to tryptophan (W). Optionally, the altered cytidine deaminase includes other active site residues disclosed herein.

[0127] In one embodiment, the amino acid sequence of an ACD includes the amino acids of a member of the APOBEC3A subfamily: X₂₆-GRXXTXLCYXV-X₁₅-G-X₁₆-HAEXXF-X₁₄-YXXTWXXSWSPC-X₄-CA-X₅-FL-X₇-LXIFXXR(L/I) Y-X₈-GLXXLXXXG-X₅-M-X₄-FXXCWXXFV-X₆-FXPW-X₁₃-LXXI-X₆ (SEQ ID NO:15) (where X is any amino acid, and the subscript number after X refers to the number of amino acids present), or a subset thereof, and at least one substitution mutation disclosed herein. The underlined tyrosine (Y) of SEQ ID NO:15 is the position functionally equivalent to the tyrosine amino acid 130 of the APOBEC3A protein SEQ ID NO:3. In one embodiment, the substitution mutation is a substitution mutation at the underlined tyrosine (Y), such as a substitution mutation to alanine (A) or to tryptophan (W). Optionally, the altered cytidine deaminase includes other active site residues disclosed herein.

[0128] A substitution mutation can be at the same position or a functionally equivalent position compared to a reference cytidine deaminase. By “functionally equivalent” it is meant that the altered cytidine deaminase has the amino acid substitution at the amino acid position in a reference cytidine deaminase that has the same functional role in both the reference cytidine deaminase and the altered cytidine deaminase.

[0129] In general, functionally equivalent substitution mutations in two or more different cytidine deaminases occur at homologous amino acid positions in the amino acid sequences of the cytidine deaminases. Hence, use herein of the term “functionally equivalent” also encompasses mutations that are “positionally equivalent” or “homologous” to a given mutation, regardless of whether or not the particular function of the mutated amino acid is known. It is possible to identify the locations of functionally equivalent and positionally equivalent amino acid residues in the amino acid sequences of two or more different cytidine deaminases on the basis of sequence alignment and/or molecular modelling. An example of a sequence alignment to identify positionally equivalent and/or functionally equivalent residues is set forth in FIG. 3. For example, the residues in the members of the APOBEC3A subfamily in FIG. 3 that are vertically aligned are considered positionally equivalent as well as functionally equivalent to the corresponding residue in the human APOBEC3A amino acid sequence. Thus, for example, as shown in FIG. 3, the tyrosine at residue 130 of the APOBEC3A proteins of Homo sapiens, Pongo pygmaeus, Nomascus leucogenys, Pan troglodytes, and Gorilla gorilla and the tyrosine at residue 133 of the APOBEC3A protein from Macaca fascicularis are functionally equivalent and positionally equivalent. The skilled person can easily identify functionally equivalent residues in cytidine deaminases.

[0130] In one embodiment, an altered cytidine deaminase has an amino acid sequence that is structurally similar to a reference cytidine deaminase disclosed herein. In one embodiment, a reference cytidine deaminase is one that includes the amino acid sequence of a sequence listed in Table 1, SEQ ID NO:14, or SEQ ID NO:15.

[0131] As used herein, an ACD may be “structurally similar” or have “structural similarity” to a reference cytidine deaminase if the amino acid sequence of the ACD possesses a specified amount of sequence similarity and/or sequence identity compared to the reference cytidine deaminase.

[0132] Structural similarity of two amino acid sequences can be determined by aligning the residues of the two sequences (for example, a candidate ACD and a reference cytidine deaminase described herein) to optimize the number of identical amino acids along the lengths of their sequences; gaps in either or both sequences are permitted in making the alignment in order to optimize the number of identical amino acids, although the amino acids in each sequence must nonetheless remain in their proper order. A candidate altered cytidine deaminase is the cytidine deaminase being compared to the reference cytidine deaminase. A candidate ACD that has structural similarity with a reference cytidine deaminase and cytidine deaminase activity is an altered cytidine deaminase.

[0133] Unless modified as otherwise described herein, a pair-wise comparison analysis of amino acid sequences can be conducted, for instance, by the local homology algorithm of Smith & Waterman, Adv. Appl. Math. 2:482 (1981), by the homology alignment algorithm of Needleman & Wunsch, J. Mol. Biol. 48:443 (1970), by the search for similarity method of Pearson & Lipman, Proc. Nat'l. Acad. Sci. USA 85:2444 (1988), by computerized implementations of these algorithms (GAP, BESTFIT, FASTA, and TFASTA in the Wisconsin Genetics Software Package, Genetics Computer Group, 575 Science Dr., Madison, Wis.), or by visual inspection (see generally Current Protocols in Molecular Biology, Ausubel et al., eds., Current Protocols, a joint venture between Greene Publishing Associates, Inc. and John Wiley & Sons, Inc., supplemented through 2004). One example of an algorithm that is suitable for determining structural similarity is the BLAST® algorithm, which is described in Altschul et al., J. Mol. Biol. 215:403-410 (1990). The BLAST® algorithm can be used to calculate percent sequence identity and percent sequence similarity between two sequences. Software for performing BLAST® analyses is publicly available through the National Center for Biotechnology Information.

[0134] In the comparison of two amino acid sequences, structural similarity may be referred to by percent “identity” or may be referred to by percent “similarity.” “Identity” refers to the presence of identical amino acids. “Similarity” refers to the presence of not only identical amino acids but also the presence of conservative substitutions. Thus, in one embodiment the amino acid sequence of a cytidine deaminase protein having sequence similarity to a reference sequence may include conservative substitutions of amino acids present in that reference sequence.

[0135] A conservative substitution for an amino acid in a protein may be selected from other members of the class to which the amino acid belongs. For example, it is well-known in the art of protein biochemistry that an amino acid belonging to a grouping of amino acids having a particular size or characteristic (such as charge, hydrophobicity, or hydrophilicity) can be substituted for another amino acid without altering the activity of a protein, particularly in regions of the protein that are not directly associated with biological activity. For example, amino acids having a non-polar side chain include alanine, glycine, isoleucine, leucine, methionine, phenylalanine, proline, tryptophan, and valine; amino acids having a hydrophobic side chain include glycine, alanine, valine, leucine, isoleucine, proline, phenylalanine, methionine, and tryptophan; amino acids having a polar side chain include arginine, asparagine, aspartic acid, glutamine, glutamic acid, histidine, lysine, serine, cysteine, tyrosine, and threonine; and amino acids having an uncharged side chain include glycine, serine, cysteine, asparagine, glutamine, tyrosine, and threonine.

[0136] Thus, as used herein, reference to a cytidine deaminase as described herein, such as reference to the amino acid sequence of one or more SEQ ID NOs described herein can include a protein having structural similarity to the reference cytidine deaminase, e.g., at least 60%, at least 65%, at least 70%, at least 75%, at least 80%, at least 85%, at least 86%, at least 87%, at least 88%, at least 89%, at least 90%, at least 91%, at least 92%, at least 93%, at least 94%, at least 95%, at least 96%, at least 97%, at least 98%, or at least 99% amino acid sequence similarity to the reference cytidine deaminase. Examples of ACDs having similarity with a reference amino acid sequence includes those having, for instance, at least 60% to at least 99% similarity with (i) SEQ ID NO:3, (ii) SEQ ID NO:16 (iii) SEQ ID NO:17, (iv) SEQ ID NO:69, (v) SEQ ID NO:137 and having a W at amino acid 133, (vi) SEQ ID NO:138 and having an A, G, F, H, Q, M, N, K, V, D, E, S, C, P or T, at amino acid 130, a R, H, K, Q at amino acid 132, and a valine at amino acid 133, and (vii) SEQ ID NO:139 and having an aspartic acid at amino acid 130, and H, R, or K at amino acid 132, and an A, G, S, or T at amino acid 133.

[0137] Alternatively, as used herein, reference to a cytidine deaminase as described herein, such as reference to the amino acid sequence of one or more SEQ ID NOs described herein can include a protein having structural similarity to the reference cytidine deaminase, e.g., at least 60%, at least 65%, at least 70%, at least 75%, at least 80%, at least 85%, at least 86%, at least 87%, at least 88%, at least 89%, at least 90%, at least 91%, at least 92%, at least 93%, at least 94%, at least 95%, at least 96%, at least 97%, at least 98%, or at least 99% amino acid sequence identity to the reference cytidine deaminase. Examples of ACDs having identity with a reference amino acid sequence includes those having, for instance, at least 60% to at least 99% identity with (i) SEQ ID NO:3, (ii) SEQ ID NO:16 (iii) SEQ ID NO:17, (iv) SEQ ID NO:69, (v) SEQ ID NO:137 and having a W at amino acid 133, (vi) SEQ ID NO:138 and having an A, G, F, H, Q, M, N, K, V, D, E, S, C, P or T, at amino acid 130, a R, H, K, Q at amino acid 132, and a valine at amino acid 133, and (vii) SEQ ID NO:139 and having an aspartic acid at amino acid 130, and H, R, or K at amino acid 132, and an A, G, S, or T at amino acid 133.

### Substitution Mutations Conferring Altered Cytidine Deaminase Activity

[0138] An altered cytidine deaminase of the present disclosure can include a substitution mutation at a position functionally equivalent to tyrosine at position 130 (Y130) in a member of the APOBEC protein family, including a member of the APOBEC3A subfamily (for instance, SEQ ID NO:3). In some APOBEC family proteins, the wild-type residue at a position functionally equivalent to Y130 is phenylalanine (F). Accordingly, in some ACDs the residue at a position functionally equivalent to Y130 can be described as (Tyr/Phe) 130 or Y/F130. As described herein, substitution mutations at this position can result in an ACD having 5mC-selective deaminase activity, 5hmC-deficient activity, 5mC- and 5hmC-preferring activity, or 5hmC-preferring activity.

[0139] An altered cytidine deaminase of the present disclosure can include a substitution mutation at a position two, three, four, or five amino acids on the C-terminal side of the Y130 position, or functionally equivalent to the Y130 position. In one embodiment, the second mutation is at a position functionally equivalent to tyrosine at position 132 (Y132) in a member of the APOBEC protein family, including a member of the APOBEC3A subfamily (for instance, SEQ ID NO:3). In some embodiments, the substitution mutation at a position two, three, four, or five amino acids on the C-terminal side of the Y130 position, or functionally equivalent to the Y130 position is optionally present with a substitution mutation at a position functionally equivalent to tyrosine at position 130 (Y130). As described herein, a substitution mutation at this position alone or in combination with a substitution mutation at the Y130 position can further enhance the altered activity of an ACD.

[0140] In one embodiment, the substitution mutation at a position functionally equivalent to Y130 increases cytidine deaminase activity and preferentially acts on 5mC compared to cytosine (i.e., has 5mC-selective deaminase activity). The substitution mutation in an ACD is at a position functionally equivalent to position 130 in a member of the APOBEC protein family, including a member of the APOBEC3A subfamily (for instance, SEQ ID NO:3) and can be a mutation to alanine (A), glycine (G), phenylalanine (F), histidine (H), glutamine (Q), methionine (M), asparagine (N), lysine (K), valine (V), aspartic acid (D), glutamic acid (E), serine(S), cysteine (C), proline (P), or threonine (T) (FIG. 3). In one embodiment, the substitution mutation at a position functionally equivalent to Y130 is Y130A (e.g., SEQ ID NO: 16). In one embodiment, the substitution mutation at a position functionally equivalent to Y130 is Y130S.

[0141] Optionally, an ACD that has 5mC-preferring activity further includes a second substitution mutation at a position two, three, four, or five amino acids on the C-terminal side of the Y130 position, or functionally equivalent to the Y130 position. In one embodiment, the second mutation is at a position functionally equivalent to tyrosine at position 132 (Y132) in a member of the APOBEC protein family, including a member of the APOBEC3A subfamily (for instance, SEQ ID NO:3). The substitution mutation at the second position can be arginine (R), histidine (H), lysine (K), or glutamine (Q). In one embodiment, the substitution mutation at the second position is histidine, such as Y132 to histidine (Y132H). The double mutant containing both first and second mutations can be any substitution mutation at a position functionally equivalent to Y130 described herein and any second substitution mutation at a position two, three, four, or five amino acids on the C-terminal side of the Y130 position described herein, in any combination. An example of an ACD that has 5mC selective deaminase activity or 5mC- and 5hmC-preferring activity has the substitution mutation Y130A/Y132H, where the ACD with 5mC selective deaminase activity also includes D133W, and the ACD with 5mC- and 5hmC-preferring activity also includes D133V. An example of an ACD that preferentially acts on 5mC compared to C has the substitution mutation Y130A/Y132H. Other combinations of substitution mutations at Y130 and/or Y132 in the presence of one or more selection-enhancing mutations, one or more stability-enhancing mutations, or both selection-enhancing stability-enhancing mutations are described herein. In a further embodiment, the 5mC-selecting ACD comprises Y130X₁, Y132X₂ and D133X₃ substitution mutations that confer 5mC-selectivity (at least 50% increase in 5mC, alternatively at least 75%, alternatively at least 80%, alternatively at least 85%, alternatively at least 90%, alternatively at least 95%). A substitution mutation at D133 is a selectivity-enhancing alteration, and selectivity-enhancing alterations are described herein. In some embodiments, X₁ is selected from A, G, F, H, Q, M, N, K, V, D, E, S, C, P, T, and in one embodiment X₁ is selected from A or S; X₂ is selected from R, H, L, Q, preferably, H; and X₃ is selected from W, V, or C, in one embodiment, W. Thus, in one embodiment, the 5-mC selective ACD comprises Y130A/Y132H/D133W, and in one embodiment, the ACD having 5mC- and 5hmC-preferring activity comprises Y130A/Y132H/D133V.

[0142] In some embodiments, the ACD comprises Y130A/Y132H/D133W or Y130A/Y132H/D133V and further comprises one or more, two or more, three or more, four or more, five or more, six or more, seven or more, eight or more, nine or more, ten or more of the stability-enhancing alterations described herein.

[0143] In one embodiment, the substitution mutation at a position functionally equivalent to Y130 results in 5hmC-defective deaminase activity (i.e., preferentially deaminates C and 5mC to U and T, respectively, and has significantly reduced deamination of 5hmC). The substitution mutation in an ACD is at a position functionally equivalent to position 130 in a member of the APOBEC protein family, including a member of the APOBEC protein family, including a member of the APOBEC3A subfamily (for instance, SEQ ID NO:3) and can be a mutation to tryptophan (W), phenylalanine (F), leucine (L), or alanine (A).

[0144] In one embodiment, the substitution mutation at a position functionally equivalent to D133 results in 5mC- and 5hmC-preferring activity. The substitution mutation in an ACD is at a position functionally equivalent to position 133 in a member of the APOBEC protein family, including a member of the APOBEC3A subfamily (for instance, SEQ ID NO:3) and can be a mutation to valine (V). Examples of ACDs that have 5mC- and 5hmC-preferring activity include Y130A/Y132H/D133V, Y130A/Y132C/D133S, Y130A/Y132H/D133C, Y130A/Y132H/D133E, Y130C/Y132H/D133V, Y130S/Y132H/D133C, Y130S/Y132H/D133E, and Y130T/Y132H/D133V. Additionally or alternatively, ACDs that have 5mC- and 5hmC-preferring activity may have a substitution mutation at a position functionally equivalent toY130 other than T. For example, an ACD having 5mC- and 5hmC-preferring activity may include Y130T, Y130S, or Y130C, such as Y130T/Y132H/D133V, Y130S/Y132H/D133C, or Y130C/Y132H/D133V. Additionally or alternatively, ACDs that have 5mC- and 5hmC-preferring activity may have a substitution mutation at a position functionally equivalent to D133 other than V. For example, an ACD having 5mC- and 5hmC-preferring activity may include Y130A/Y132H/D133C, Y130A/Y132H/D133E, Y130S/Y132H/D133C, or Y130S/Y132H/D122E.

[0145] In one embodiment, substitution mutations at a position functionally equivalent to Y130, Y132, and D133 results in 5hmC-preferring activity. An ACD having 5hmC-preferring activity includes a substitution mutation of the tyrosine at 130 to aspartic acid (Y130D), a substitution mutation of the tyrosine at 132 to histidine, arginine, or lysine (Y132X, where X is H, R, or K), and a substitution mutation of the aspartic acid at 133 to alanine, glycine, serinee, or threonine (D133Z, where Z is A, G, S, or T). Thus, 5-hmC-preferring ACD can be described as including Y130D/Y132X/D133Z, where X is H, R, or K, and Z is A, G, S, or T. Specific examples of 5-hmC-preferring ACDs include Y130D/Y132H/D133A, Y130D/Y132H/D133T, Y130D/Y132K/D133S, Y130D/Y132K/D133T, or Y130D/Y132R/D133S. Examples of 5hmC-preferring ACDs include SEQ ID NOs: 101-109, 120, 127, and 129-136.

[0146] An ACD having substitution mutations that confer 5mC-selective deaminase activity, 5hmC-deficient activity, 5mC- and 5hmC-preferring activity, or 5hmC-preferring activity can further include one or more, two or more, three or more, four or more, five or more, six or more, seven or more, eight or more, nine or more, or ten or more of the stability-enhancing alterations described herein.

### Substitution Mutations Conferring Increased Selectivity or Stability

[0147] An ACD of the present disclosure can include at least one alteration, e.g., one or more substitution mutation, one or more deletion, and/or one or more insertion, that enhances selectivity or stability of an ACD. In some embodiments, the alteration may enhance both selectivity and stability of an ACD.

### Selectivity

[0148] An ACD having an alteration that enhances selectivity can be one that has substitution mutations that confer 5mC-selective deaminase activity, 5hmC-deficient activity, 5mC- and 5hmC-preferring activity, or 5hmC-preferring activity. Thus, one or more alterations that enhances selectivity can be present in an ACD having 5mC-selective deaminase activity (e.g., having a substitution mutation at a position functionally equivalent to Y130 where the substitution is to A, G, F, H, Q, M, N, K, V, D, E, S, C, P or T; a substitution mutation at a position functionally equivalent to Y132 where the substitution is to R, H, K, Q; or substitution mutations at positions functionally equivalent to Y130 and to Y132.

[0149] One or more alterations that enhances selectivity can be present in an ACD having 5hmC-deficient activity (e.g., having a substitution mutation at a position functionally equivalent to Y130 where the substitution is to W. One example of such an ACD is SEQ ID NO: 59.

[0150] One or more alterations that enhances selectivity can be present in an ACD having 5mC- and 5hmC-preferring activity (e.g., having a substitution mutation at a position functionally equivalent to Y130 where the substitution is to A, a substitution mutation at a position functionally equivalent to Y132 where the substitution is to H, and a substitution mutation at a position functionally equivalent to Y133 where the substitution is to V). Examples of such ACDs include SEQ ID NOs: 119, 126, 213-215, and 271-284.

[0151] One or more alterations that enhances selectivity can be present in an ACD having 5hmC-preferring activity (e.g., having a substitution mutation at a position functionally equivalent to Y130 where the substitution is to D; a substitution mutation at a position functionally equivalent Y132 where the substitution is to H, R, or K; and a substitution mutation at a position functionally equivalent to D133 where the substitution is to A, G, S, or T. Thus, in some embodiments, 5hmC-preferring ACD include, but are not limited to, e.g., Y130D/Y132H/D133A; Y130D/Y132H/D133G; Y130D/Y132H/D133S; Y130D/Y132H/D133T; Y130D/Y132R/D133A; Y130D/Y132R/D133G; Y130D/Y132R/D133S; Y130D/Y132R/D133T; Y130D/Y132K/D133A; Y130D/Y132K/D133G; Y130D/Y132K/D133S; or Y130D/Y132K/D133T.

[0152] A selectivity-enhancing alteration can be (i) a substitution mutation at a position functionally equivalent to an amino acid, a deletion, or an insertion, (ii) a substitution mutation in combination with one or more deletions and one or more insertions, (iii) combinations of more than one selectivity-enhancing substitution mutation in combination with one or more deletion, one or more insertion, or in combination with both one or more deletion and one or more insertion. A selectivity-enhancing alteration is considered to enhance the selectivity of an ACD for its substrate (e.g., greater selectivity of 5mC for an ACD having 5mC-preferring activity, greater selectivity of C and 5mC for an ACD having 5hmC-deficient activity, greater selectivity of 5mC and 5hmC for an ACD having 5mC- and 5hmC-preferring activity, and greater selectivity of 5hmC for an ACD having 5hmC-preferring activity).

[0153] The locations of selectivity-enhancing alterations have been identified and the specific alterations predicted using various approaches. In one embodiment, a substitution mutation that is a selectivity-enhancing alteration for an ACD having 5mC-preferring activity is at a position functionally equivalent to the aspartic acid at position 133 (D133) in a member of the APOBEC protein family, including a member of the APOBEC3A subfamily (for instance, SEQ ID NO:3).

[0154] The substitution mutation at D133 can be to any amino acid, and in one embodiment is to W (D133W) or C (D133C). For instance, the protein can include, in addition to a substitution mutation at a position functionally equivalent to D133, a substitution mutation at a position functionally equivalent to Y130 and optionally a substitution mutation at a position functionally equivalent to Y132. The substitution mutation at a position functionally equivalent to Y130 can be a mutation to A, G, F, H, Q, M, N, K, V, D, E, S, C, P or T, and in exemplary embodiments is A or S. The optional substitution mutation at a position functionally equivalent to Y132 can be a mutation to R, H, K, Q, and in one exemplary embodiment is H. Specific examples of an ACD that has enhanced selectivity for 5mC are Y130A/D133X, Y130S/D133X, Y130A/Y132H/D133X, and Y130S/Y132H/D133X, where X is any amino acid other than D, and in some embodiments X is W or C.

[0155] An ACD that preferentially deaminates 5mC instead of C can have one or more selectivity-enhancing substitution mutations at a position functionally equivalent to amino acids having proximity to the active site. Examples of this type of selectivity-enhancing substitution mutations are the following: the histidine at position 29 (H29), the lysine at position 30 (K30), the threonine at position 31 (T31), the tryptophane at position 98 (W98), the serine at position 99 (S99), the proline at position 100 (P100), the phenylalanine at position 102 (F102), the serine at position 103 (S103), the tryptophan at position 104 (W104), the glycine at position 105 (G105), the tyrosine at position 130 (Y130), the aspartic acid at position 131 (D131), the tyrosine at position 132 (Y132), the aspartic acid at position 133 (D133), or the proline at position 134 (P134), in a member of the APOBEC protein family, including a member of the APOBEC3A subfamily (for instance, SEQ ID NO:3). The substitution mutation can result in changing the wild-type residue (e.g., H29, K30, etc.) to any of the other 19 amino acids. In one embodiment, the ACD can include a deletion of amino acids at positions functionally equivalent to amino acids 104 and 105 (AW104-G105). For instance, an ACD can include, in addition to one or more substitution mutations at a position functionally equivalent to amino acids having proximity to the active site, a substitution mutation at a position functionally equivalent to Y130 and optionally a substitution mutation at a position functionally equivalent to Y132. The substitution mutation at a position functionally equivalent to Y130 can be a mutation to A, G, F, H, Q, M, N, K, V, D, E, S, C, P or T, and in exemplary embodiments is A or S. The optional substitution mutation at a position functionally equivalent to Y132 can be a mutation to R, H, K, Q, and in one exemplary embodiment is H. If present, the mutation at D133 can be W or C. Thus, an ACD can have one, two, three, four, five, six, seven, eight, nine, 10, or all 11 of the selectivity-enhancing substitution mutations, in any combination. An ACD can have one, two, three, four, five, six, seven, eight, nine, 10, or all 11 of the selectivity-enhancing substitution mutations, in any combination, with any other selectivity-enhancing alteration described herein. Optionally, the ACD can further include one or more of the stability-enhancing substitution mutations described herein.

[0156] An ACD that preferentially deaminates 5mC instead of C can have one or more selectivity-enhancing substitution mutations at a position functionally equivalent to amino acids that are expected to co-evolve with residues 57, 97, 98, 130, 132, and/or 134. One example of this type of selectivity-enhancing substitution mutation is one or more substitution mutations at positions functionally equivalent to the serine at position 97 (S97), the isoleucine at position 124 (1124), the arginine at position 128 (R128), the isoleucine at position 129 (1129), and the threonine at position 152 (T152) in a member of the APOBEC protein family, including a member of the APOBEC3A subfamily (for instance, SEQ ID NO:3). Another example is one or more substitution mutations at positions functionally equivalent to the asparagine at position 57 (N57), the arginine at position 74 (R74), the phenylalanine at position 75 (F75), the leucine at position 78 (L78), the phenylalanine at position 158 (F158), and the tryptophane at position 162 (W162). A third example is one or more substitution mutations at positions functionally equivalent to the phenylalanine at position 125 (F125), the alanine at position 126 (A126), the alanine at position 127 (A127), the proline at position 134 (P134), and the tyrosine at position 136 (Y136) in a member of the APOBEC protein family, including a member of the APOBEC3A subfamily (for instance, SEQ ID NO:3). The substitution mutation can result in changing the wild-type residue (e.g., S97, 1124, etc.) to any of the other 19 amino acids. For instance, an ACD can include, in addition to one or more substitution mutations at a position functionally equivalent to amino acids that are expected to co-evolve with residues 57, 97, 98, 130, 132, and/or 134, a substitution mutation at a position functionally equivalent to Y130 and optionally a substitution mutation at a position functionally equivalent to Y132. The substitution mutation at a position functionally equivalent to Y130 can be a mutation to A, G, F, H, Q, M, N, K, V, D, E, S, C, P or T, and in exemplary embodiments is A or S. The optional substitution mutation at a position functionally equivalent to Y132 can be a mutation to R, H, K, Q, and in one exemplary embodiment is H. If present, the mutation at D133 can be Wor C. Optionally, an ACD having one or more of these alterations can further include one or more of any of the other selectivity-enhancing alterations described herein. Optionally, the ACD can further include one or more of the stability-enhancing substitution mutations described herein.

[0157] An ACD that preferentially deaminates 5mC instead of C can have one or more selectivity-enhancing alterations at a position functionally equivalent to amino acids based on the observation that substitution mutations at position 103 in an APOBEC3A protein affect selectivity, and deletion of residues 104-105 was beneficial to both stability and to activity. One example of this type of selectivity-enhancing alteration is a substitution mutation at a position functionally equivalent to the serine at position 103 (S103) in a member of the APOBEC protein family, including a member of the APOBEC3A subfamily (for instance, SEQ ID NO:3). Another example of this type of selectivity-enhancing alteration is a substitution mutation at a position functionally equivalent to the serine at position 103 (S103) and a deletion of the amino acids at positions functionally equivalent to the tryptophane and glycine at positions 104 and 105, respectively (W104, G105) in a member of the APOBEC protein family, including a member of the APOBEC3A subfamily (for instance, SEQ ID NO:3). For instance, an ACD can include, in addition to one or more substitution mutations at a position functionally equivalent to amino acids at positions 103-105, a substitution mutation at a position functionally equivalent to Y130 and optionally a substitution mutation at a position functionally equivalent to Y132. The substitution mutation at a position functionally equivalent to Y130 can be a mutation to A, G, F, H, Q, M, N, K, V, D, E, S, C, P or T, and in exemplary embodiments is A or S. The optional substitution mutation at a position functionally equivalent to Y132 can be a mutation to R, H, K, Q, and in one exemplary embodiment is H. If present, the mutation at D133 can be W or C. Optionally, an ACD having one or more of these alterations can further include one or more of any of the other selectivity-enhancing alterations described herein. Optionally, the ACD can further include one or more of the stability-enhancing substitution mutations described herein.

[0158] An ACD that preferentially deaminates 5mC instead of C can have one or more selectivity-enhancing alterations at a position functionally equivalent to amino acids expected to increase selectivity based on molecular dynamics analysis (see Example 6). Specific examples of substitution mutations identified in different scaffolds as likely to increase selectivity of an ACD are shown in Table 2. For instance, an ACD can include, in addition to one or more substitution mutations at a position functionally equivalent to amino acids expected to increase selectivity based on molecular dynamics analysis, a substitution mutation at a position functionally equivalent to Y130 and optionally a substitution mutation at a position functionally equivalent to Y132. The substitution mutation at a position functionally equivalent to Y130 can be a mutation to A, G, F, H, Q, M, N, K, V, D, E, S, C, P or T, and in exemplary embodiments is A or S. The optional substitution mutation at a position functionally equivalent to Y132 can be a mutation to R, H, K, Q, and in one exemplary embodiment is H. If present, the mutation at D133 can be W or C.

TABLE 2
Selectivity-enhancing alterations identified by molecular dynamics analysis.
Substitution mutations and deletions tested at each position¹

| | | |
|---|---|---|
| A107V | R111F | E109K/R111A/Y136I/A139G |
| A107L | Y136A | A112E/E138A |
| A107S | Y136E | A112E/A139G |
| A107T | Y136Q | A112E/M142R |
| A107F | Y136L | A112E/E138A/A139G/M142R |
| A107Y | Y136F | R144H |
| A107F/F102K/I193D | Y136E/I193D | R111A |
| F102K/I193D | F102A/Δ103-104 | K137Q |
| I193D | F102A/G105A | Q141R/D145R |
| L194D | F102A/Δ103-104/G105A | Q141R/R144H |
| A139V | F102Y/G105D | M142R/D145R |
| A139F | F102Y/G105D/C108R | Δ104-105/A107V |
| A139S | F102A/V110L | Δ104-105/A107L |
| A139T | F102A/R111A | Δ104-105/A107S |
| A139Y | G105A/E109K | Δ104-105/A107T |
| A139G | G105D/M142R | Δ104-105/A107F |
| N57D | A107S/F102A | Δ104-105/A107Y |
| Q58E | A107S/G105N | Δ104-105/A107F/F102K/I193D |
| E109K | A107S/E109R | Δ104-105/A139V |
| E109H | A107S/V110L | Δ104-105/A139F |
| E109L | A107S/A112Q | Δ104-105/A139S |
| E109F | A107S/Q115S | Δ104-105/A139T |
| E109Q | A107S/Y136E | Δ104-105/A139Y |
| E109A | A107S/R144K | Δ104-105/A139G |
| A112E | E109K/V110L/R111A/A112E | Δ104-105/F102A/G105A |
| A112Q | E109K/R111A/A112E | Δ104-105/F102Y/G105D/C108R |
| A112K | E109K/Y136I | Δ104-105/A107S/F102A |
| A112L | E109K/A139G | Δ104-105/E109K/A139G |
| R111T | R111A/A139G | Δ104-105/R111A/A139G |

¹Position of the substitution mutation and the identity of the substitution mutation/position of deletions tested at the position. Each substitution mutation was tested as described in Example 6 in the scaffold
Y130A/Y132H/D133W/R74L/T19Y/C171A/G108C/G188R/G25K/S45W/I17T/A59P/K60R/Δ61-68 (SEQ ID NO: 75, ScK).

[0159] Optionally, an ACD can have one or more of the of the selectivity-enhancing alterations in Table 2, in any combination, with any other selectivity-enhancing alteration described herein. Optionally, the ACD can further include one or more of the stability-enhancing substitution mutations described herein.

[0160] An ACD that preferentially deaminates 5mC instead of C can have one or more selectivity-enhancing alterations at a position functionally equivalent to amino acids expected to increase selectivity based on analysis to make more space in the binding pocket of a cytidine deaminase or ACD for 5mC (see Example 7). Typically, the addition of space was by insertion of one or more amino acids. Specific examples of substitution alterations identified as likely to increase selectivity of an ACD are shown in Table 3. For instance, an ACD can include, in addition to one or more substitution mutations at a position functionally equivalent to amino acids expected to increase selectivity based on analysis to make more space in the binding pocket, a substitution mutation at a position functionally equivalent to Y130 and optionally a substitution mutation at a position functionally equivalent to Y132. The substitution mutation at a position functionally equivalent to Y130 can be a mutation to A, G, F, H, Q, M, N, K, V, D, E, S, C, P or T, and in exemplary embodiments is A or S. The optional substitution mutation at a position functionally equivalent to Y132 can be a mutation to R, H, K, Q, and in one exemplary embodiment is H. The mutation at D133 can be W or C. If present, the mutation at D133 can be W or C.

TABLE 3
Selectivity-enhancing substitution alterations.

| | 5 mC |
|---|---|
| Substitution alteration¹ | selectivity |
| Σ25-26: P_K25G | + |
| Σ25-26: P_K25D | |
| Σ25-26: P_K25E | |
| Σ25-26: P_K25R | |
| Σ25-26: P | |
| Σ25-26: P_K25D_I26L | |
| Σ25-26: P_K25E_I26L | |
| Σ25-26: P_K25R_I26L | |
| Σ25-26: P_I26L | |
| Σ25-26: S_K25G | + |
| Σ25-26: S_K25D | |
| Σ25-26: S | |
| Σ25-26: I_K25G | |
| Σ25-26: I_K25E | |
| Σ25-26: I | |
| Σ25-26: S_K25G_I26L | |
| Σ25-26: S_K25D_I26L | |
| Σ25-26: S_I26L | |
| Σ25-26: I_K25G_I26Y | |
| Σ25-26: I_K25E_I26Y | |
| Σ25-26: I_I26Y | |
| Σ25-26: V_K25G | |
| Σ25-26: V_K25D | |
| Σ25-26: V | |
| Σ25-26: V_K25G_I26L | |
| Σ25-26: V_K25D_I26L | |
| Σ25-26: V_I26L | |
| Σ25-26: A | + |
| Σ25-26: VEY_K25G | |
| Σ25-26: VEY_K25S | |
| Σ25-26: VEY | |
| Σ25-26: AAA | |
| Σ130-131: Y | |
| Σ130-131: Y_D131H | |
| Σ130-131: Y_D131F | |
| Σ130-131: Y_D131H_H132W | |
| Σ130-131: Y_D131F_H132W | |
| Σ130-131: Y_D131H_H132W_W133D_L135H | |
| Σ130-131: Y_D131F_H132W_W133D_L135H | |
| Σ130-131: Y_A130Y_D131H_H132W_W133D_L135H | |
| Σ130-131: Y_A130Y_D131F_H132W_W133D_L135H | |
| Σ130-131: A | |
| Σ131-132: F | |
| Σ131-132: F_D131Y_H132W_W133D | |
| Σ131-132: F_D131Y_H132W_W133D_L135D | |
| Σ131-132: F_A130Y_D131Y_H132W_W133D_L135D | |
| Σ131-132: A | |
| Σ132-133: E | |
| Σ132-133: E_W133E | |
| Σ132-133: E_H132W_W133E | |
| Σ132-133: E_D131M_H132W_W133E | |
| Σ132-133: E_D131M_H132W_W133E_L135E | |
| Σ132-133: E_A130F_D131M_H132W_W133E_L135E | |
| Σ132-133: A | |
| Σ134-135: K | |
| Σ134-135: K_L135A | |
| Σ134-135: K_P134D_L135A | |
| Σ134-135: K_W133E_P134D_L135A | |
| Σ134-135: K_H132C_W133E_P134D_L135A | |
| Σ134-135: K_D131F_H132C_W133E_P134D_L135A | |
| Σ134-135: K_A130Y_D131F_H132C_W133E_P134D_L135A | |
| Σ134-135: A | |
| Σ132-133: W | |
| Σ132-133: W_W133E | |
| Σ26-27: A | |
| Σ27-28: A | |
| Σ28-29: A | + |
| Σ29-30: A | |
| Σ30-31: A | |
| Σ31-32: A | |
| Σ32-33: A | |
| Σ95-96: A | |
| Σ96-97: A | |
| Σ97-98: A | |
| Σ98-99: A | |
| Σ99-100: A | |
| Σ100-101: A | |
| Σ101-102: A | |
| Σ102-103: A | |
| Σ103-104: A | |
| Σ104-105: A | |
| Σ127-128: A | |
| Σ128-129: A | |
| Σ133-134: A | |
| Σ135-136: A | |
| Σ136-137: A | |
| Σ137-138: A | |
| Σ138-139: A | |
| Σ25-26: A | |
| Σ25-26: C | |
| Σ25-26: D | |
| Σ25-26: E | |
| Σ25-26: F | |
| Σ25-26: G | |
| Σ25-26: H | |
| Σ25-26: I | |
| Σ25-26: K | + |
| Σ25-26: L | |
| Σ25-26: M | |
| Σ25-26: N | |
| Σ25-26: P | |
| Σ25-26: Q | |
| Σ25-26: R | |
| Σ25-26: S | |
| Σ25-26: T | |
| Σ25-26: V | |
| Σ25-26: W | |
| Σ25-26: Y | |
| Σ28-29: A | |
| Σ28-29: C | |
| Σ28-29: D | |
| Σ28-29: E | |
| Σ28-29: F | |
| Σ28-29: G | |
| Σ28-29: H | |
| Σ28-29: I | |
| Σ28-29: K | |
| Σ28-29: L | |
| Σ28-29: M | |
| Σ28-29: N | |
| Σ28-29: P | |
| Σ28-29: Q | |
| Σ28-29: R | |
| Σ28-29: S | |
| Σ28-29: T | + |
| Σ28-29: V | |
| Σ28-29: W | |
| Σ28-29: Y | |
| Σ103-104: A | |
| Σ103-104: C | |
| Σ103-104: D | |
| Σ103-104: E | |
| Σ103-104: F | |
| Σ103-104: G | |
| Σ103-104: H | |
| Σ103-104: I | |
| Σ103-104: K | |
| Σ103-104: L | |
| Σ103-104: M | |
| Σ103-104: N | |
| Σ103-104: P | + |
| Σ103-104: Q | |
| Σ103-104: R | |
| Σ103-104: S | |
| Σ103-104: T | |
| Σ103-104: V | |
| Σ103-104: W | |
| Σ103-104: Y | |
| Σ104-105: A | |
| Σ104-105: C | |
| Σ104-105: D | |
| Σ104-105: E | |
| Σ104-105: F | |
| Σ104-105: G | |
| Σ104-105: H | |
| Σ104-105: I | |
| Σ104-105: K | |
| Σ104-105: L | |
| Σ104-105: M | |
| Σ104-105: N | |
| Σ104-105: P | |
| Σ104-105: Q | |
| Σ104-105: R | |
| Σ104-105: S | |
| Σ104-105: T | |
| Σ104-105: V | |
| Σ104-105: W_W104G/G105W | |
| Σ104-105: Y | |

¹: Position of the substitution alteration and the identity of the insertion and/or substitution mutation tested at the position. Insertions are named with an “Σ”, followed by the two residues that flank the insertion and the amino acid inserted. For instance, Σ25-26: P_K25G means a proline (P) amino acid was inserted between the amino acids at positions 25 and 26. The substitution alterations are tested in the scaffold Y130A/Y132H/D133W/R74L/T19Y/C171A/G108C/G188R/G25K/S45W/I17T/A59P/K60R/Δ61-68 (SEQ ID NO: 75, ScK). In some constructs one or more substitution mutation present in ScK are modified by substitution mutation, For instance, the scaffold K (SEQ ID NO: 75) carries the G25K mutation, but in the mutant Σ25-26: P_K25G, G25K was reverted back to G.
+ means 5 mC selectivity was observed.

[0161] Examples of substitution alterations include Σ25-26: P_K25G, Σ25-26:A, Σ25-26:S_K25G, Σ28-29:A, Σ104-105:A, Σ28-29:A,Σ25-26: K, and W104C. For instance, an ACD can include, in addition to one or more alterations of Table 3, a substitution mutation at a position functionally equivalent to Y130 and optionally a substitution mutation at a position functionally equivalent to Y132. The substitution mutation at a position functionally equivalent to Y130 can be a mutation to A, G, F, H, Q, M, N, K, V, D, E, S, C, P or T, and in exemplary embodiments is A or S. The optional substitution mutation at a position functionally equivalent to Y132 can be a mutation to R, K, L, Q, and in one exemplary embodiment is H. If present, the mutation at D133 can be W or C. Optionally an ACD can have one or more of the selectivity-enhancing alterations in Table 3, in any combination, with any other selectivity-enhancing alteration described herein. Optionally, the ACD can further include one or more of the stability-enhancing substitution mutations described herein.

[0162] In one embodiment, an ACD having wild-type activity can have more than one selectivity-enhancing alterations described herein. The selectivity-enhancing alterations can be (i) a substitution mutation at a position functionally equivalent to D133, (ii) one or more selectivity-enhancing substitution mutations at a position functionally equivalent to amino acids having proximity to the active site as described herein, (iii) one or more selectivity-enhancing substitution mutations at a position functionally equivalent to amino acids that are expected to co-evolve with residues 57, 97, 98, 130, 130, 132, and/or 134, (iv) one or more selectivity-enhancing alterations at a position functionally equivalent to amino acids based on the observation that substitution mutations at position 103 in an APOBEC3A protein affect selectivity, and deletion of residues 104-105 is beneficial to stability, (v) one or more selectivity-enhancing alterations in Table 2, and/or (vi) one or more selectivity-enhancing alterations in Table 3. In one embodiment, a substitution mutation or a deletion is at a position functionally equivalent to an amino acid in a member of the APOBEC protein family, including a member of the APOBEC3A subfamily (for instance, SEQ ID NO:3).

### Stability

[0163] Experiments to identify stability-enhancing substitution alterations were initiated to address the reduced stability observed with some selectivity-enhancing alterations (e.g., the Y130/Y132/D133 triple mutation). In some embodiments, the stability-enhancing substitution alterations increase the thermal melting point of an ACD. Increased temperature optimums are highly desirable because it decreases DNA secondary structures by opening reaction sites that would be otherwise inaccessible due to secondary structure resulting in decreased false positive rate; stabilizes the enzyme in reaction conditions, which permits longer incubations and increased conversion; increases reaction kinetics, which allows for more tightly controlled conditions; and improved characteristics for commercialization, including increased shelf life, robustness in the assay, manufacturability, etc.

[0164] The stability-enhancing alterations described herein were identified in an ACD having 5mC-preferring activity, but these stabilization mutations can be used to stabilize any cytidine deaminase, regardless of target activity, including the ability to stabilize cytidine deaminases having 5hmC-deficient activity, 5mC- and 5hmC-preferring activity, or 5hmC-preferring activity or any other ACD activity. Thus, in some embodiments, the ACD have one or more stability-enhancing alterations, two or more stability-enhancing alterations, three or more stability-enhancing alterations; four or more stability-enhancing alterations; five or more stability-enhancing alterations; six or more stability-enhancing alterations; seven or more stability-enhancing alterations; eight or more stability-enhancing alterations; nine or more stability-enhancing alterations; ten or more stability-enhancing alterations; eleven or more stability-enhancing alterations; twelve or more stability-enhancing alterations; thirteen or more stability-enhancing alterations; or fourteen or more stability-enhancing alterations. Suitable stability-enhancing alterations can be found in Table 4 and 6, with specific examples included in Table 5, and can be combined in any number of combinations, including those described in Tables 7 and 8.

[0165] An ACD having a substitution mutation that enhances stability can have 5mC selective deaminase activity, 5hmC-deficient activity, 5mC- and 5hmC-preferring activity, or 5hmC-preferring activity. A substitution mutation that enhances stability can be present in an ACD that includes one or more of the selectivity-enhancing substitution mutations described herein, including but not limited to (i) a substitution mutation at a position functionally equivalent to D133, (ii) one or more selectivity-enhancing substitution mutations at a position functionally equivalent to amino acids having proximity to the active site as described herein, (iii) one or more selectivity-enhancing substitution mutations at a position functionally equivalent to amino acids that are expected to co-evolve with residues 57, 97, 98, 130, 130, 132, and/or 134, (iv) one or more selectivity-enhancing alterations at a position functionally equivalent to amino acids based on the observation that substitution mutations at position 103 in an APOBEC3A protein affect selectivity, and deletion of residues 104-105 is beneficial to stability, (v) one or more selectivity-enhancing alterations in Table 2, and/or (vi) one or more selectivity-enhancing alterations in Table 3.

[0166] A stability-enhancing alteration can be a substitution mutation at a position functionally equivalent to an amino acid, a deletion, or an insertion; a substitution mutation in combination with one or more deletions and one or more insertions; and combinations of one or more stability-enhancing substitution mutations in combination with one or more deletion, one or more insertion, or in combination with both one or more deletion and one or more insertion. A stability-enhancing alteration (e.g., substitution mutation, deletion, or insertion) is considered to enhance the stability of an ACD if it increases the melting temperature of the ACD. A substitution mutation, deletion, or insertion is considered to be stability-enhancing if it can increase the melting temperature of an ACD by at least 1° C., at least 2° C., at least 3° C., at least 4° C., at least 5° C., or at least 6° C. compared to the same ACD that does not have the stability-enhancing substitution mutation. A suitable method of determining the melting temperature of an ACD described herein is by fluorimetry (see Examples 12 and 15). However, it is well within one skilled in the art to determine the melting temperature of the ACDs described herein.

[0167] The locations of stability-enhancing substitution mutations have been identified and the specific substitutions predicted using various approaches including rational design, phylogenetic analysis, energy calculations, interface stabilization, Evmutation (Hopf et al., Nat Biotechnol. 2017 February; 35 (2): 128-135. Doi: 10.1038/nbt.3769.), and Evcoupling (Hopf et al., Bioinformatics, 2019 May 1;35 (9): 1582-1584. Doi: 10.1093/bioinformatics/bty862.). Suitable examples of stability-enhancing substitutions can be found in Tables 4-5 and can be combined in any number of combinations to provide improved stability. In some examples, the locations of amino acids in an APOBEC3A (SEQ ID NO:3) where substitution mutation result in increased stability include A112X, A126X, A139X, A148X, A185X, A192X, A59X, A87X, C106X, C161X, C171X, C34X, D145X, D156X, D163X, D167X, D177X, D180X, D41X, D77X, D85X, E109X, E116X, E138X, E157X, E38X, G105X, G108X, G188X, G25X, G27X, H119X, H11X, H16X, H182X, H29X, H51LX, 117X, 126X, 189X, K47X, K60X, L135X, L62X, L78X, M14X, M48X, N117X, N196X, N21X, N42X, P80X, Q115X, Q141X, Q169X, Q184X, R111X, R123X, R189X, R39X, R74X, R91X, S103X, S183X, S187X, S20X, S45X, T118X, T164X, T19X, T31X, T93X, V110X, V79X, L12X, D14X, T19X, G27X, R28X, E38X, F54X, H56X, N57X, Y67X, L73X, D77X, S81X, Y90X, 196X, S97X, C101X, F102X, W104X, C106X, A107X, L114X, V120X, L122X, R128X, Y136X, M142X, A146X, K159X, C161X, L186X, and any combination thereof where the position number designation is functionally equivalent to the position in a wild-type APOBEC3A (SEQ ID NO:3) and X is an amino acid substitution different from the wild-type amino acid at that position. As discussed above, one or more of these stabilizing mutations may be contemplated in combination. Specific examples of substitution mutations identified as stabilizing in different scaffolds are shown in Table 5.

TABLE 4
Stability-enhancing positions (relative to APOBEC A3A).
Substitution mutation position*

H11X
L12X
D14X
H16X
I17X
T19X
S20X
N21X
G25X
I26X
G27X
R28X
H29X
T31X
C34X
E38X
R39X
D41X
N42X
S45X
K47X
M48X
H51X
F54X
H56X
N57X
A59X
K60X
L62X
Y67X
L73X
R74X
D77X
L78X
V79X
P80X
S81X
D85X
A87X
I89X
Y90X
R91X
T93X
W94X
I96X
S97X
C101X
F102X
S103X
W104X
G105X
C106X
A107X
G108X
E109X
V110X
R111X
A112X
L114X
Q115X
E116X
N117X
T118X
H119X
V120X
L122X
R123X
R128X
L135X
Y136X
E138X
A139X
Q141X
M142X
D145X
A146X
A148X
D156X
E157X
K159X
C161X
D163X
T164X
D167X
Q169X
C171X
D177X
D180X
H182X
S183X
Q184X
A185X
L186X
S187X
G188X
R189X
A192X
N196X
1: Position of the substitution mutation where the position number designation is functionally equivalent to the position in a wild-type APOBEC3A (SEQ ID NO: 3) and X is an amino acid substitution different from the wild-type amino acid at that position.

TABLE 5
Stability-enhancing substitution mutations.

| Substitution | | |
|---|---|---|
| mutation | | Mutation |
| tested at the | | identified as |
| position¹ | Scaffold² | stabilizing³ |
| H11L | ScE | + |
| H11R | ScE | |
| H11E | ScK | |
| H11P | ScE | |
| L12A | ScK | |
| L12W | ScK | |
| D14Y | ScE | + |
| H16L | ScB | |
| H16W | ScB | |
| H16D | ScK | + |
| I17T | ScE | + |
| T19 | ScB | + |
| T19L | ScE | + |
| T19I | ScE | + |
| T19F | ScE | |
| T19W | ScE | |
| S20F | ScE | + |
| S20F | ScK | + |
| S20E | ScK | + |
| S20Y | ScK | + |
| S20I | ScK | + |
| S20H | ScK | |
| S20W | ScK | |
| 21H | ScE | |
| N21Q | ScK | |
| N21W | ScE | |
| G25R | ScB | + |
| G25L | ScB | |
| G25V | ScB | + |
| G25D | ScE | |
| G25A | ScE | |
| G25K | ScB | + |
| I26R | ScE | + |
| I26L | ScK | |
| I26A | ScK | |
| G27I | ScE | |
| G27L | ScE | |
| G27Y | ScK | |
| G27F | ScK | |
| G27C | ScK | |
| G27R | ScK | |
| R28V | ScK | |
| H29R | ScK | |
| T31I | ScE | + |
| T31F | ScE | |
| T31W | ScE | + |
| C34L | ScE | |
| C34I | ScE | |
| C34V | ScE | |
| C34R | ScK | |
| E38W | ScK | |
| E38Y | ScK | |
| R39L | ScE | |
| D41K | ScE | |
| 42D | ScK | |
| N42G | ScK | |
| S45T | ScB | |
| S45W | ScB | + |
| S45R | ScE | + |
| K47P | ScE | + |
| K47P | ScK | |
| M48N | ScK | |
| M48K | ScK | |
| M48S | ScK | |
| M48Q | ScK | |
| M48D | ScK | |
| M48L | ScK | |
| M48E | ScK | |
| H51L | ScB | |
| F54V | ScK | |
| H56R | ScK | |
| N57D | ScE | |
| A59P | ScE | |
| A59L | ScK | |
| K60P | ScE | |
| K60R | ScK | + |
| K60G | ScK | + |
| L62P | ScE | + |
| Y67R | ScB | |
| L73A | ScB | |
| R74N | ScB | |
| R74L | ScA | + |
| R74C | ScE | |
| R74I | ScE | |
| D77R | ScE | |
| L78H | ScE | + |
| V79L | ScE | |
| P80R | ScE | + |
| P80Q | ScE | |
| P80T | ScE | + |
| P80H | ScE | |
| P80S | ScE | + |
| P80G | ScE | + |
| P80W | ScE | |
| P80F | ScE | |
| P80K | ScE | |
| P80L | ScE | |
| P80E | ScE | |
| P80Y | ScE | |
| P80D | ScE | |
| P80V | ScE | |
| S81W | ScK | |
| D85I | ScK | |
| D85L | ScK | |
| A87R | ScE | |
| I89R | ScE | + |
| I89S | ScE | |
| I89T | ScE | + |
| I89D | ScE | |
| I89Q | ScE | |
| I89H | ScE | + |
| I89R | ScK | + |
| I89C | ScE | |
| Y90G | ScB | |
| R91L | ScB | |
| T93I | ScE | |
| W94L | ScB | |
| I96T | ScB | |
| S97L | ScK | |
| S97Y | ScK | |
| C101W | ScK | |
| F102N | ScK | |
| S103H | ScE | |
| S103F | ScE | |
| S103R | ScE | + |
| S103Y | ScE | + |
| S103W | ScK | |
| S103Y | ScK | |
| S103L | ScK | |
| S103M | ScK | |
| S103K | ScK | |
| S103T | ScK | + |
| S103I | ScK | |
| S103R | ScK | |
| S103D | ScK | |
| S103Q | ScK | |
| S103C | ScK | |
| S103H | ScK | |
| W104R | ScK | |
| W104L | ScK | |
| G105S | ScB | |
| G105W | ScK | |
| G105Y | ScK | |
| G105N | ScK | |
| G105K | ScK | |
| G105L | ScE | |
| C106S | ScE | |
| C106K | ScK | |
| C106I | ScE | |
| C106T | ScE | |
| A107F | ScK | |
| G108C | ScB | + |
| G108I | ScB | |
| G108P | ScB | |
| G108F | ScB | |
| G108A | ScB | + |
| G108Y | ScE | + |
| G108M | ScE | |
| G108D | ScE | |
| G108Q | ScE | |
| G108L | ScE | |
| G108H | ScE | |
| G108R | ScE | |
| G108W | ScE | |
| C108M | ScK | |
| C108F | ScK | |
| C108E | ScK | |
| C108K | ScK | |
| C108P | ScK | |
| C108S | ScK | |
| E109Q | ScB | + |
| E109L | ScK | + |
| E109W | ScK | |
| E109T | ScK | |
| V110L | ScK | + |
| V110W | ScK | |
| R111A | ScK | |
| R111V | ScK | |
| R111E | ScK | |
| R111Q | ScK | |
| A112F | ScK | |
| A112D | ScK | |
| A112H | ScK | |
| A112T | ScK | |
| A112Y | ScK | |
| L114G | ScK | |
| Q115K | ScK | + |
| Q115L | ScK | |
| Q115W | ScK | |
| Q115M | ScK | |
| Q115Y | ScK | + |
| Q115C | ScK | |
| E116L | ScK | + |
| E116F | ScK | |
| E116V | ScK | |
| N117Y | ScK | |
| N117W | ScE | |
| T118W | ScB | |
| T118P | ScE | + |
| T118N | ScK | |
| T118K | ScK | |
| H119W | ScE | |
| V120H | ScK | |
| V120N | ScK | |
| L122D | ScK | |
| R123H | ScB | + |
| A126F | ScE | + |
| A126I | ScE | |
| A126L | ScE | |
| A126V | ScE | |
| A126C | ScK | + |
| A126S | ScK | |
| R128Y | ScK | |
| L135W | ScK | |
| L135F | ScK | |
| L135R | ScK | |
| L135Q | ScK | |
| Y136D | ScK | |
| Y136K | ScK | |
| Y136W | ScK | |
| E138W | ScK | |
| E138R | ScK | + |
| E138Q | ScK | |
| E138F | ScK | |
| E138I | ScK | |
| E138L | ScK | |
| E138A | ScK | + |
| E138P | ScK | |
| E138M | ScK | |
| A139V | ScK | |
| A139Q | ScK | |
| A139W | ScK | |
| A139G | ScK | |
| Q141R | ScE | |
| M142W | ScK | |
| M142L | ScK | |
| M142T | ScK | |
| M142A | ScK | |
| M142R | ScK | |
| D145R | ScK | + |
| A146E | ScK | |
| A146G | ScK | |
| A148V | ScE | |
| A148L | ScK | |
| D156P | ScK | |
| D156W | ScK | |
| E157W | ScE | |
| K159R | ScK | |
| C161I | ScE | |
| C161L | ScE | |
| C161V | ScE | |
| C161M | ScE | + |
| D163W | ScK | |
| T164I | ScE | |
| D167Y | ScK | |
| Q169R | ScK | |
| C171A | ScB | + |
| C171I | ScE | |
| C171R | ScK | |
| D177E | ScK | |
| D180W | ScB | + |
| D180E | ScB | |
| D180H | ScK | + |
| H182N | ScK | |
| S183W | ScE | + |
| S183F | ScE | + |
| S183V | ScK | + |
| S183Y | ScK | |
| Q184V | ScK | |
| A185I | ScE | + |
| A185F | ScE | |
| A185H | ScE | |
| A185R | ScK | + |
| L186W | ScB | |
| S187L | ScB | |
| S187I | ScE | |
| S187W | ScE | |
| S187E | ScE | |
| S187Q | ScK | |
| S187F | ScK | |
| S187Y | ScK | |
| G188I | ScB | + |
| G188 | ScB | + |
| G188Q | ScB | + |
| G188R | ScB | + |
| G188L | ScE | |
| G188A | ScE | |
| R189K | ScK | + |
| A192E | ScK | + |
| A192R | ScK | |
| A192L | ScK | |
| A192K | ScK | |
| A192I | ScK | |
| A192W | ScK | |
| N196P | ScE | |

¹: Position of the substitution mutation and the identity of the substitution mutation tested at the position in exemplary scaffold APOBEC background. For instance, H11L means the histidine at position 11 was replaced with a leucine.
²: Each substitution mutation was tested in an APOBECA3A protein (SEQ ID NO: 3) scaffold background that included the additional substitution mutations: e.g., ScB, Y130A/Y132H/C171A (SEQ ID NO: 68); ScE, Y130A/Y132H/D133W/R74L/C171A/T19Y (SEQ ID NO: 72); ScK, Y130A/Y132H/D133W/R74L/T19Y/C171A/G108C/G188R/G25K/S45W/I17T/A59P/K60R/Δ61-68 (SEQ ID NO: 75); ScA, Y130A/Y132H/D133W (SEQ ID NO: 69).
³: +++, the substitution mutation increased stability substantially; +, the substitution mutation increased stability;; −, the substitution mutation did not increase stability. See Examples 2-5. Other scaffold backgrounds for addition of these mutations are contemplated and this table is exemplary.

[0168] A stability-enhancing alteration can be a deletion. Tolerance to engineered deletions and insertions can be correlated with the rigidity of secondary structures. Beta sheets and helices tend to be the least tolerant to deletions and insertions, while loops and unstructured regions can be more tolerant. Loops in an APOBEC3A were identified and subjected to deletion mutagenesis, and the location of stability-enhancing substitution mutations that are deletions were identified. In some cases, the deletions have been tested. In one embodiment, the deletions are at positions functionally equivalent to positions shown in Table 6.

TABLE 6
Stability-enhancing deletions

| | Exemplary Scaffold² | Effect³ |
|---|---|---|
| Deletion¹ | used in construction | (−/+/++) |
| ΔM1-L12 (the first | ScK and ScI | + |
| 12 amino acids of | | |
| human APOBECA3A | | |
| (SEQ ID NO: 3) | | |
| ΔE36-G53 | | |
| ΔN42 | ScK | − |
| ΔN61-G68 | ScF | ++ |
| ΔP86 | ScK | − |
| ΔW104-G105 | ScK | ++ |
| ΔL135-K137 | ScK | +/increases |
| | | preference |
| | | for C |
| ΔP172 | ScK | − |
| ΔS187-N199 | ScK | + |
| ΔI26-G27 | ScK | ++/ increases |
| | | preference |
| | | for C |

¹: Position of the deletion in an APOBEC3A (SEQ ID NO: 3).
²: Deletions tested and found to increase stability when present in an APOBECA3A protein that included the Y130A and Y132H substitution mutations.
³: − does not increase stability; + neutral effect; ++ increases stability, some positions also increased selectivity as noted. See Examples 4-5.

[0169] Also note that the one or more ACD described herein may include one or more of the alterations in Table 4 (substitutions), Table 5 (substitutions) or Table 6 (deletions) as they may confer other desirable or beneficial effects (e.g., solubility, expression) for the cytidine deaminase. Therefore, the present ACD contemplated may contain one or more deletion (e.g., ΔS187-N199) to provide additional beneficial properties and may be used in connection with the selectivity/stability mutations of the present disclosure.

[0170] Some deletions can further include one or more ancillary substitution mutations. An ACD described herein can include the A61-68 deletion and the ancillary substitution mutation at (i) the position functionally equivalent to A59 where the mutation is to proline (A59P) or leucine (A59L), (ii) the position functionally equivalent to K60 where the mutation is to arginine (K60R), glutamic acid ((K60E), glutamine (K60Q), or glycine (K60G), or (iii) the position functionally equivalent to R69 (i.e., the position 69 prior to the deletion of 61-68) where the mutation is to tyrosine (R69Y), asparagine (R69N, histidine (R69H), aspartic acid (R69D), or leucine (R69L). Specific combinations of the Δ61-68 deletion and ancillary substitution mutations are Δ61-68/A59P/K60R, Δ61-68/A59L/R69Y, Δ61-68/A59L/K60E/R69N, Δ61-68/A59P/K60E/R69H, Δ61-68/A59P/K60Q/R69H, Δ61-68/A59L/R69N, Δ61-68/R69D, Δ61-68/A59L/K60R, and Δ61-68/A59P/K60G/R69L. An ACD described herein can include the Δ104-105 deletion and the ancillary substitution mutation at the position functionally equivalent to F102 where the mutation is to arginine (F102R), the substitution mutation at the position functionally equivalent to S103 where the mutation is to asparagine (S103N), or both substitution mutations F102R and S103N. In another embodiment, an ACD described herein can include both the Δ104-105 deletion and the Δ1-12 deletion. Additional embodiments include: an ACD having the Δ104-105 deletion, the Δ1-12 deletion, and the substitution mutation F102R; an ACD having the Δ104-105 deletion, the Δ1-12 deletion, and the substitution mutation S103N; and an ACD having the Δ104-105 deletion, the Δ1-12 deletion, and the substitution mutations F102R and S103N.

[0171] An ACD having 5mC-selective deaminase activity, 5hmC-deficient activity, 5mC- and 5hmC-preferring activity, or 5hmC-preferring activity described herein can further include one or more stability-enhancing alterations selected from I17T, T19Y, G25K, S45W, A59P, K60R, deletion of 61-68, R74L, deletion of W104, deletion of G105, G108C, A126C, C171A, G188R, or a combination thereof, where the substitution mutation or a deletion is at a position functionally equivalent to an amino acid in a member of the APOBEC protein family, including a member of the APOBEC3A subfamily (for instance, SEQ ID NO:3). An ACD having wild-type activity or 5mC-preferring activity described herein can further include the stability-enhancing alterations I17T, T19Y, G25K, S45W, A59P, K60R, deletion of 61-68, R74L, deletion of W104, deletion of G105, G108C, C171A, and G188R (SEQ ID NO:77) where the substitution mutation or a deletion is at a position functionally equivalent to an amino acid in a member of the APOBEC protein family, including a member of the APOBEC3A subfamily (for instance, SEQ ID NO:3). An ACD having wild-type activity or 5mC-preferring activity described herein can further include the stability-enhancing alterations I17T, T19Y, G25K, S45W, A59P, K60R, deletion of 61-68, R74L, G108C, C171A, and G188R (SEQ ID NO:117) where the substitution mutation or a deletion is at a position functionally equivalent to an amino acid in a member of the APOBEC protein family, including a member of the APOBEC3A subfamily (for instance, SEQ ID NO:3). An ACD having wild-type activity or 5mC-preferring activity described herein can further include the stability-enhancing alterations I17T, T19Y, G25K, S45W, A59P, K60R, deletion of 61-68, R74L, deletion of G105, G108C, C171A, and G188R (SEQ ID NO:125), where the substitution mutation or a deletion is at a position functionally equivalent to an amino acid in a member of the APOBEC protein family, including a member of the APOBEC3A subfamily (for instance, SEQ ID NO:3).

[0172] For example, one or more additional stability-enhancing alterations and/or deletions of Table 4-8 can be added to any one of the specificity-enhancing alterations described herein (e.g., (i) one or more selectivity-enhancing substitution mutations at a position functionally equivalent to amino acids having proximity to the active site as described herein, (ii) one or more selectivity-enhancing substitution mutations at a position functionally equivalent to amino acids that are expected to co-evolve with residues 57, 97, 98, 130, 130, 132, and/or 134, (iii) one or more selectivity-enhancing alterations at a position functionally equivalent to amino acids based on the observation that substitution mutations at position 103 in an APOBEC3A protein affect selectivity, and deletion of residues 104-105 is beneficial to stability, (iv) one or more selectivity-enhancing alterations in Table 2, and/or (v) one or more selectivity-enhancing alterations in Table 3). Examples of ACDs that include one or more stability-enhancing alterations in addition to one or more specificity-enhancing alterations include, but are not limited to, SEQ ID NO:68 (ScB), SEQ ID NO:69 (ScA), SEQ ID NO:70 (ScD), SEQ ID NO:71 (ScC), SEQ ID NO:72 (ScE), SEQ ID NO:73 (ScL), SEQ ID NO:74 (ScF), SEQ ID NO:75 ScK), SEQ ID NO:76 (ScJ), or SEQ ID NO:77 (ScI).

[0173] Examples of combinations of stability-enhancing alterations that can be present in an ACD are also described at Table 7 and 8. In some embodiments, an ACD that includes one or more selectivity-enhancing alterations described herein can further include one or more stability-enhancing alterations selected from I17T, T19Y, G25K, S45W, A59P, K60R, deletion of 61-68, R74L, deletion of W104, deletion of G105, G108C, A126C, C171A, G188R, or a combination thereof, where the substitution mutation or a deletion is at a position functionally equivalent to an amino acid in a member of the APOBEC protein family, including a member of the APOBEC3A subfamily (for instance, SEQ ID NO:3). In one embodiment, an ACD that includes one or more selectivity-enhancing alterations described herein includes stability-enhancing alterations I17T, T19Y, G25K, S45W, A59P, K60R, deletion of 61-68, R74L, G108C, C171A, and G188R where the substitution mutation or a deletion is at a position functionally equivalent to an amino acid in a member of the APOBEC protein family, including a member of the APOBEC3A subfamily (for instance, SEQ ID NO:3). In one embodiment, an ACD that includes one or more selectivity-enhancing alterations described herein includes stability-enhancing alterations I17T, T19Y, G25K, S45W, A59P, K60R, deletion of 61-68, R74L, deletion of G105, G108C, C171A, and G188R where the substitution mutation or a deletion is at a position functionally equivalent to an amino acid in a member of the APOBEC protein family, including a member of the APOBEC3A subfamily (for instance, SEQ ID NO:3).

[0174] An ACD having a stability-enhancing alteration can further include one or more selectivity-enhancing alterations, such as (i) a substitution mutation at a position functionally equivalent to D133, (ii) one or more selectivity-enhancing substitution mutations at a position functionally equivalent to amino acids having proximity to the active site as described herein, (iii) one or more selectivity-enhancing substitution mutations at a position functionally equivalent to amino acids that are expected to co-evolve with residues 57, 97, 98, 130, 130, 132, and/or 134, (iv) one or more selectivity-enhancing alterations at a position functionally equivalent to amino acids based on the observation that substitution mutations at position 103 in an APOBEC3A protein affect selectivity, and deletion of residues 104-105 is beneficial to stability, (v) one or more selectivity-enhancing alterations in Table 2, and/or (vi) one or more selectivity-enhancing alterations in Table 3.

[0175] The inventors found that ACDs with at least one selectivity-enhancing mutation such as D133W, at least one stability-enhancing mutation such as R74L, and a Y130A mutation had improved 5mC selectivity regardless of which amino acid was present at Y132. Thus, in one embodiment an ACD can include the substitution mutations X₁/Y130A/Y132X₂/D133X₃, where X₁ is any one or more stability-enhancing substitution, X₂ is any amino acid, and X₃ is any amino acid, and in one embodiment is W, C, or V.

[0176] The inventors have observed that addition of stability-enhancing substitution alterations to an ACD that includes other stability-enhancing alterations results in an additive effect. Proteins can be dramatically stabilized without reducing biological function of the protein (Bloom et al., PNAS, 103 (15): 5869-5874), and this additive effect of stability-enhancing mutations has been observed by the inventors in ACD proteins (see FIG. 9). Accordingly, the inventors expect that addition of any subset of stability-enhancing alterations is possible and that they will result in increases in stability without sacrificing activity. Thus, in another embodiment, an ACD can have more than one stability-enhancing alteration. For instance, an ACD having substitutions conferring 5mC-selective deaminase activity or 5mC- and 5hmC-preferring activity (e.g., Y130A or Y130A/Y132H), or 5hmC-defective deaminase activity (e.g., Y130W) can further include more than one stability-enhancing alteration. The stability-enhancing alterations can be (i) one or more stability-enhancing substitution mutation at a position functionally equivalent to H11X, L12X, D14X, H16X, 117X, T19X, S20X, N21X, G25X, 126X, G27X, R28X, H29X, T31X, C34X, E38X, R39X, D41X, N42X, S45X, K47X, M48X, H51X, F54X, H56X, N57X, A59X, K60X, L62X, Y67X, L73X, R74X, D77X, L78X, V79X, P80X, S81X, D85X, A87X, 189X, Y90X, R91X, T93X, W94X, 196X, S97X, C101X, F102X, S103X, W104X, G105X, C106X, A107X, G108X, E109X, V110X, R111X, A112X, L114X, Q115X, E116X, N117X, T118X, H119X, V120X, L122X, R123X, R128X, L135X, Y136X, E138X, A139X, Q141X, M142X, D145X, A146X, A148X, D156X, E157X, K159X, C161X, D163X, T164X, D167X, Q169X, C171X, D177X, D180X, H182X, S183X, Q184X, A185X, L186X, S187X, G188X, R189X, A192X, N196X, where the position number designation is functionally equivalent to the position in a wild-type APOBEC3A (SEQ ID NO:3) and X is an amino acid substitution different from the wild-type amino acid at that position, (ii) one or more stability-enhancing substitution mutation at a position functionally equivalent to any of those listed in Table 4, 5, 7, or 8, and/or (iii) one or more stability-enhancing deletion at a position functionally equivalent to those listed in Table 6 and optionally one or more ancillary substitution mutations. In one embodiment, a substitution mutation or a deletion is at a position functionally equivalent to an amino acid in a member of the APOBEC protein family, including a member of the APOBEC3A subfamily (for instance, SEQ ID NO:3).

[0177] Without intending to limit the particular combinations of stability-enhancing alterations encompassed by the present disclosure, specific examples of combinations of stability-enhancing alterations that can be present in an ACD having 5mC-selective deaminase activity, 5hmC-deficient activity, 5mC- and 5hmC-preferring activity, or 5hmC-preferring activity and one or more specificity-enhancing alterations described herein include but are not limited to those shown in Table 2 or 3. Many more combinations are contemplated and these Tables are not to be considered exhaustive. In some examples the ACDs include those having structural similarity to (i) SEQ ID NO:3, (ii) SEQ ID NO:16 (iii) SEQ ID NO:17, (iv) SEQ ID NO: 69, (v) SEQ ID NO:37 and having a W at amino acid 133, (vi) SEQ ID NO:138 and having an A, G, F, H, Q, M, N, K, V, D, E, S, C, P or T, at amino acid 130, a R, H, K, Q at amino acid 132, and a valine at amino acid 133, or (vii) SEQ ID NO:139 and having an aspartic acid at amino acid 130, and H, R, or K at amino acid 132, and an A, G, S, or T at amino acid 133, and at least one of the following combinations of stabilizing mutations, where the numbering is based on SEQ ID NO:3: R74X/C171X; R74X/T19X; R74X/G25X; R74X/T19X/C171X; R74X/T19X/C171X; R74X/T19X/C171X/117X; R74X/T19X/C171X/G25X; R74X/T19X/C171X/G25X/117X; R74X/T19X/C171X/G25X/T19X; R74X/T19X/C171X/G25X; R74X/T19X/C171X/S45X; R74C/T19X/C171X; R74X/T19X/C171X/T19X; R74X/T19X/C171X/T19X; R74X/T19X/C171X/G108X; R74X/T19X/C171X/G108X; R74X/T19X/C171X/G108X; R74X/T19X/C171X/G108X; R74X/T19X/C171X/G108X; R74X/T19X/C171X/G108X; R74X/T19X/C171X/G108X; R74X/T19X/C171X/G108X; R74X/T19X/C171X/A126X; R74X/T19X/C171X; R74X/T19X/C171X/G108X; R74X/T19X/C171X/G108X; R74X/T19X/C171X/A126X; R74X/T19X/C171X/A126X; R74X/T19X/C171X/A126X; R74X/T19X/C171X; R74X/T19X/C171X/S45X; R74X/T19X/C171X/G25X; R74X/T19X/C171X/G25X; R74X/T19X/C171X/G188X; R74X/T19X/C171X/G188X; R74X/T19X/C171X/G188X; R74X/T19X/C171X/G108X; R74X/T19X/C171X/G108X/G188X/G25X/S45X; R74X/T19X/C171X/G108X; R74X/T19X/C171X/G108X/G188X/G25X/S45X/117X; R74X/T19X/C171X/G108X/G188X/G25X/S45X/117X/A59X/K60X/A61-68; R74X/T19X/C171X/G108X/G188X/G25X/S45X/117X; R74X/T19X/C171X/G108X/G188X/G25X/S45X/117X/A59X/K60X/A61-68/A126X; R74X/T19X/C171X/G108X/G188X/G25X/S45X/117X/A59X/K60X/A61-68, I17X/T19X/G25X/S45X/A59X/K60X/deletion of 61-68/R74X/G108X/C171X/G188X; or I17X/T19X/G25KXS45X/A59X/K60X/deletion of 61-68/R74X/deletion of G105/G108X/C171X/G188X, wherein X is an amino acid substitution different than wildtype.

[0178] In some examples, the altered cytosine deaminases include, but are not limited to, for example, those having structural similarity to (i) SEQ ID NO:3, (ii) SEQ ID NO:16 (iii) SEQ ID NO:17, (iv) SEQ ID NO:69, (v) SEQ ID NO:137 and having a W at amino acid 133, (vi) SEQ ID NO: 138 and having an A, G, F, H, Q, M, N, K, V, D, E, S, C, P or T, at amino acid 130, a R, H, K, Q at amino acid 132, and a valine at amino acid 133, or (vii) SEQ ID NO:139 and having an aspartic acid at amino acid 130, and H, R, or K at amino acid 132, and an A, G, S, or T at amino acid 133, and at least one of the following combinations of stabilizing mutations, where the numbering is based on SEQ ID NO:3: R74L/C171A; R74L/T19Y; R74L/G25R; R74L/T19I/C171A; R74L/T19L/C171A; R74L/T19Y/C171A/117T; R74L/T19Y/C171A/G25A; R74L/T19Y/C171A/G25R/117T; R74L/T19Y/C171A/G25R/T19F; R74L/T19Y/C171A/G25D; R74L/T19Y/C171A/S45R; R74C/T19Y/C171A; R74L/T19Y/C171A/T19F; R74L/T19Y/C171A/T19W; R74L/T19Y/C171A/G108E; R74L/T19Y/C171A/G108D; R74L/T19Y/C171A/G108Q; R74L/T19Y/C171A/G108Y; R74L/T19Y/C171A/G108H; R74L/T19Y/C171A/G108L; R74L/T19Y/C171A/G108K; R74L/T19Y/C171A/G108R; R74L/T19Y/C171A/A126V; R74L/T19Y/C171I; R74L/T19Y/C171A/G108M; R74L/T19Y/C171A/G108W; R74L/T19Y/C171A/A126F; R74L/T19Y/C171A/A126I; R74L/T19Y/C171A/A126L; R74L/T19Y/C171A; R74L/T19Y/C171A/S45W; R74L/T19Y/C171A/G25R; R74L/T19Y/C171A/G25K; R74L/T19Y/C171A/G188Q; R74L/T19Y/C171A/G188A; R74L/T19Y/C171A/G188R; R74L/T19Y/C171A/G108A; R74L/T19Y/C171A/G108A/G188R/G25K/S45W; R74L/T19Y/C171A/G108C; R74L/T19Y/C171A/G108A/G188R/G25K/S45W/117T; R74L/T19Y/C171A/G108A/G188R/G25K/S45W/117T/A59P/K60R/A61-68; R74L/T19Y/C171A/G108C/G188R/G25K/S45W/117T; R74L/T19Y/C171A/G108C/G188R/G25K/S45W/117T/A59P/K60R/A61-68/A126C; R74L/T19Y/C171A/G108C/G188R/G25K/S45W/117T/A59P/K60R/A61-68.

TABLE 7
Examples of ACDs with more than one
stability-enhancing alteration.

| Substitution mutations | Mutation identified as |
|---|---|
| tested at the position¹ | increasing stabilization² |
| S45W | |
| G25R, | |
| G25R, S45W | |
| G25K, | |
| G25K, S45W | + |
| G188Q, | |
| G188Q, S45W | |
| G188Q, G25R, | |
| G188Q, G25R, S45W | + |
| G188Q, G25K, | |
| G188Q, G25K, S45W | + |
| G188A, | |
| G188A, S45W | + |
| G188A, G25R, | |
| G188A, G25R, S45W | + |
| G188A, G25K, | |
| G188A, G25K, S45W | |
| G188R, | |
| G188R, S45W | |
| G188R, G25R, | |
| G188R, G25R, S45W | + |
| G188R, G25K, | |
| G188R, G25K, S45W | + |
| G108A, | |
| G108A, S45W | |
| G108A, G25R, | |
| G108A, G25R, S45W | |
| G108A, G25K, | |
| G108A, G25K, S45W | + |
| G108A, G188Q, | |
| G108A, G188Q, S45W | + |
| G108A, G188Q, G25R, | |
| G108A, G188Q, G25R, S45W | + |
| G108A, G188Q, G25K, | |
| G108A, G188Q, G25K, S45W | + |
| G108A, G188A, | |
| G108A, G188A, S45W | + |
| G108A, G188A, G25R, | |
| G108A, G188A, G25R, S45W | |
| G108A, G188A, G25K, | |
| G108A, G188A, G25K, S45W | |
| G108A, G188R, | |
| G108A, G188R, S45W | + |
| G108A, G188R, G25R, | |
| G108A, G188R, G25R, S45W | + |
| G108A, G188R, G25K, | |
| G108A, G188R, G25K, S45W | + |
| G108C, | |
| G108C, S45W | |
| G108C, G25R, | |
| G108C, G25R, S45W | + |
| G108C, G25K, | |
| G108C, G25K, S45W | + |
| G108C, G188Q, | |
| G108C, G188Q, S45W | + |
| G108C, G188Q, G25R, | |
| G108C, G188Q, G25R, S45W | |
| G108C, G188Q, G25K, | |
| G108C, G188Q, G25K, S45W | |
| G108C, G188A, | |
| G108C, G188A, S45W | + |
| G108C, G188A, G25R, | |
| G108C, G188A, G25R, S45W | + |
| G108C, G188A, G25K, | |
| G108C, G188A, G25K, S45W | + |
| G108C, G188R, | |
| G108C, G188R, S45W | + |
| G108C, G188R, G25R, | |
| G108C, G188R, G25R, S45W | + |
| G108C, G188R, G25K, | |
| G108C, G188R, G25K, S45W | + |

Each substitution mutation was tested in an APOBECA3A protein (SEQ ID NO: 3) that included the additional substitution mutations Y130A/Y132H/D133W/R74L/C171A/T19Y (ScE, SEQ ID NO: 72).
¹: Position of the substitution mutation and the identity of the substitution mutation tested at the position. For instance, S45W means the serine at position 45 was replaced with a tryptophan.
²: +++, the substitution mutation increased stability substantially; +, the substitution mutation increased stability;; −, the substitution mutation did not increase stability. See Example 3.

TABLE 8
Examples of ACDs with more than one stability-enhancing alteration.
Substitution mutations and deletions¹

A59P, K60R, Δ61-68
A59P, K60R, Δ61-68, Δ104-105
A59P, K60R, Δ61-68, Δ104-105, A126C
A59P, Δ61-68, Δ104-105, K60G
A59P, Δ61-68, Δ104-105, K60G, A126C
A59P, Δ61-68, Δ104-105, K60G, S103T
A59P, Δ61-68, Δ104-105, N21Q, K60G, A126C
A59P, Δ61-68, Δ104-105, K60G, S103T, A126C
A59P, Δ61-68, Δ104-105, K60G, R28V, S103T, A126C
A59P, Δ61-68, Δ104-105, N21Q, K60G, S103T, A126C
A59P, Δ61-68, Δ104-105, N21Q, R28V, K60G, S103T, A126C
¹: Position of the substitution mutation and the identity of the substitution mutation, position of deletions. For instance, S45W means the serine at position 45 was replaced with a tryptophan.
2: Each substitution mutation is tested in an APOBECA3A protein (SEQ ID NO: 3) that optionally includes additional stability-enhancing alterations, such as the stability-enhancing alterations found in SEQ ID NO: 68, SEQ ID NO: 69, SEQ ID NO: 70, SEQ ID NO: 71, SEQ ID NO: 72, SEQ ID NO: 73, SEQ ID NO: 74, SEQ ID NO: 75, SEQ ID NO: 76, or SEQ ID NO: 77.

[0179] In some embodiments, examples of ACDs having one or more stability-enhancing alteration and optionally one or more selectivity-enhancing substitution mutation are shown at SEQ ID NO:196 or SEQ ID NO:200, where the position number designation is functionally equivalent to the position in a wild-type APOBEC3A (SEQ ID NO:3) and X is an amino acid having the same or a different identity from the wild-type amino acid at that position, or a deletion as noted. As is shown in SEQ ID NOs: 196 and 200, numerous amino acids may be mutated to enhance the stability of the ACD. While some mutations may be additive, some may be sufficient independently, depending on the desired activity of the ACD. Thus, the mutations indicated in SEQ ID NOs: 196 and 200 are inclusive of many stability-enhancing mutations that may be made individually or in combination.

[0180] SEQ ID NO:201 is the sequence of one example of an ACD that preferentially deaminates 5-methylcytosine shown with the numerous optional stability mutations of SEQ ID NO: 196. SEQ ID NO:202 is the sequence of one example of an ACD that preferentially deaminates 5-hydroxymethylcytosine and 5-methylcytosine shown with the numerous optional stability mutations of SEQ ID NO:196. SEQ ID NO:203 is the sequence of one example of an ACD that preferentially deaminates 5-hydroxymethylcytosine shown with the numerous optional stability mutations of SEQ ID NO: 196. SEQ ID NO:216 is the sequence of one example of an ACD that preferentially deaminates unmodified cytosine and 5-methylcytosine shown with the numerous optional stability mutations of SEQ ID NO: 196. In one embodiment, examples of ACDs having one or more stability-enhancing alteration and optionally one or more selectivity-enhancing substitution mutation are shown at SEQ ID NO:197 or SEQ ID NO:204, where the position number designation is functionally equivalent to the position in a wild-type APOBEC3A (SEQ ID NO:3) and X is an amino acid having the same or a different identity from the wild-type amino acid at that position, or a deletion as noted. As is shown in SEQ ID NOs: 197 and 204, numerous amino acids may be mutated to enhance the stability and/or the selectivity of the ACD. While some mutations may be additive, some may be sufficient independently, depending on the desired activity of the ACD. Thus, the mutations indicated in SEQ ID NOs: 197 and 204 are inclusive of many stability- and/or selectivity-enhancing mutations that may be made individually or in combination.

[0181] SEQ ID NO:205 is the sequence of one example of an ACD that preferentially deaminates 5-methylcytosine shown with the numerous optional stability mutations of SEQ ID NO: 196. SEQ ID NO:206 is the sequence of one example of an ACD that preferentially deaminates 5-hydroxymethylcytosine and 5-methylcytosine shown with the numerous optional stability mutations of SEQ ID NO: 196. SEQ ID NO:207 is the sequence of one example of an ACD that preferentially deaminates 5-hydroxymethylcytosine shown with the numerous optional stability mutations of SEQ ID NO: 196. SEQ ID NO:217 is the sequence of one example of an ACD that preferentially deaminates unmodified cytosine and 5-methylcytosine shown with the numerous optional stability mutations of SEQ ID NO: 196.

[0182] Some of the stability-enhancing mutations of SEQ ID NOs: 196, 197, 200-207, 216, and 217 are described further in Examples 1-8 and 14-19.

[0183] Each “X” in each of SEQ ID NOs: 196, 197, 200-207, 216, and 217 may be mutated as described or may be the identity of the amino acid at the corresponding position in wild-type APOBEC3A (SEQ ID NO:3). Each of SEQ ID NOs: 196, 197, 200-207, 216, and 217 include an “X” for each position evaluated for a stability-enhancing alteration. An ACD of the present disclosure can include 1 or more, 2 or more, 3 or more, 4 or more, 5 or more, 6 or more, 7 or more, 8 or more, 9 or more, 10 or more, 11 or more, 12 or more, 13 or more, or 14 or more substitution alterations in any one of SEQ ID NOs: 196, 197, 200-207, 216, and 217.

[0184] SEQ ID NOs: 69-75, 76, 84, 85, 90, 93, 300-306, 308-369, 373, 376-378. 380-395, 397-486, 488-579, 582-672, 674-861, 864, 866, 872, 873, 877, 880-900, 902, 903, 905, 906, 908, 911, 915-917, 919-927, 929, 930, 932-937, 940, 941, 943-966, 968-977, 979-985, 987-990, 992-997, 999-1004, 1008-1013, 1016, 1018-1025, 1027-1029, 1031, 1033, 1035-1050, 1052-1057, 1059-1062, 1064, 1065, 1069, 1070, 1072-1090, 1092-1110, 1112-1155, 1157-1160, 1162-1165, 1167-1209, 1211-1235, and 1237 represent the amino acid sequences of 852 ACDs that were constructed and screened for activity. Sequences labeled “C” (SEQ ID NOs: 310-333) were found to preferentially deaminate unmodified cytosine. Sequences labeled “D” (SEQ ID NOs: 300-306, 308, 309) were found to be catalytically inactive. SEQ ID NOs: 69-75, 76, 84, 85, 90, 93 and sequences labeled “A” (SEQ ID NOs: 333-369, 373, 376-378. 380-395, 397-486, 488-579, 582-672, 674-861, 864, 866, 872, 873, 877, 880-900, 902, 903, 905, 906, 908, 911, 915-917, 919-927, 929, 930, 932-937, 940, 941, 943-966, 968-977, 979-985, 987-990, 992-997, 999-1004, 1008-1013, 1016, 1018-1025, 1027-1029, 1031, 1033, 1035-1050, 1052-1057, 1059-1062, 1064, 1065, 1069, 1070, 1072-1090, 1092-1110, 1112-1155, 1157-1160, 1162-1165, 1167-1209, 1211-1235, and 1237) were found to be catalytically active.

[0185] SEQ ID NOs: 1238-1241 represent consensus sequences of a multiple sequence alignment (MSA) of the 852 ACDs described in the preceding paragraph produced using Clustal Omega (McWilliam et al., 2013, Nucleic acids research 2013 July; 41 (Web Server issue): W597-600 doi: 10.1093/nar/gkt376, available on the world wide web at www.ebi.ac.uk/Tools/msa/clustalo/). SEQ ID NOs: 1238-1241 have 100%, 90%, 80%, and 70% consensus with SEQ ID NOs: 300-1237, respectively. X represents that there was no consensus residue at a location. Residues that were not identical but otherwise related (e.g., hydrophobic, small, polar, aromatic) in the consensus sequence are annotated within each consensus sequence. For the purposes of these consensus sequences, aliphatic residues include I, L, and V, alcohol residues include S and T, charged residues include D, E, H, K, and R, negatively charged residues include D and E, polar residues include C, D, E, H, K, N, Q, R, S, and T, positively charged residues include H, K, and R, small residues include A, C, D, G, N, P, S, T, and V, tiny residues include A, G, and S, and turnlike residues include A, C, D, E, G, H, K, N, Q, R, S, and T.

[0186] The person of ordinary skill in the art can confirm that the selectivity or the stability of an ACD disclosed herein is enhanced. For example, an ACD described herein can be constructed to include one or more selectivity-enhancing substitution mutations described herein and then evaluated for the appropriate selectivity activity (e.g., enhanced selectivity of 5mC or both 5mC and 5hmC). A suitable assay is the SwaI-based assay described herein, the deamination of 5mC or 5hmC of the ACD and compared to the same protein that does not include the same one or more selectivity-enhancing substitution mutations. In another example, an ACD described herein can be constructed to include one or more stability-enhancing substitution mutations described herein and then evaluated to determine is stability is increased. A suitable assay is the fluorimetry assay described herein.

[0187] An ACD described herein can include additional mutations. Typically, additional mutations do not unduly alter the activity of the altered cytidine deaminase. One or more additional mutations can be a conservative mutation. The specification discloses at FIG. 3 an alignment between a human APOBEC3A (SEQ ID NO:3, referred to as sp|P31941|1-199 in the figure), and other APOBEC3A proteins from other primates. The identical amino acids are marked with an “*” (asterisk), a “:” (colon) indicates conservation between amino acids of strongly similar properties, and a “.” (period) indicates conservation between groups of weakly similar properties. The skilled person would expect that many conservative substitutions in the areas that are identical or similar between the protein in the alignment would be likely to result in an active protein. Likewise, the skilled person would expect that many non-conservative substitutions in the areas that are identical or similar between the proteins in the alignment would be more likely to result in an inactive protein. Moreover, the location of the highly conserved spatial arrangement of the catalytic center residues of the ZDD motif is disclosed. The ZDD motif includes the H and two C residues which are believed to coordinate a Zn atom and the E residue which polarizes a water molecule near the Zn-atom for catalysis. As discussed herein the active site includes conserved residues such as tryptophan at position 98, serine or threonine at position 99, arginine at position 28, histidine, asparagine, or arginine at position 29, serine or threonine, preferably threonine, at position 31, asparagine or aspartic acid at position 57, tyrosine or phenylalanine at position 130, asparagine or tyrosine at position 131, asparagine, tyrosine, or phenylalanine, preferably tyrosine, at position 132, and arginine or lysine at position 189 of SEQ ID NO: 3 (Kouno et al., 2017, Nat. Comm, 8:15024, DOI: 10.1038/ncomms15024).

Dimerized ACDs (dACDs)

[0188] While APOBEC3A is typically found as a monomer, some variants form noncovalently associated dimers naturally in solution. Human APOBEC3A can form a homodimer via association of the so-called “dimerization interface” of the protein. (Bohn et al., 2015, Structure, 23 (5): 903-911). The purpose of dimerization has not been explicitly elucidated, but it is thought to be related to separation of binding and catalysis functions to improve target specificity. (Bohn et al.). The inventors herein demonstrated that dimerization of an ACD to form a dimerized ACD (dACD) improved enzyme stability and processivity.

[0189] As described herein, the introduction of a selectivity-enhancing mutation, such as a mutation to a position functionally equivalent to D133, was found to reduce the thermal melting point of ACDs that also included a substitution mutation at Y130, Y132, or both Y130 and Y132. Stability of ACDs is considered desirable because of their use in workflows that denature double-stranded DNA, often via increasing temperature, salt concentration, or chemical denaturant concentration, or a combination thereof.

[0190] The inventors found that dimerization of the ACDs increased the stability of altered APOBEC proteins, and, in addition the processivity of the enzyme. In addition, dimerization of a protein such as an ACD can increase the apparent local concentration of the enzyme, potentially increasing substrate turnover. The inventors found that producing dimerized altered cytidine deaminases provided beneficial properties over the monomers, as detailed more herein.

[0191] Provided herein are dimeric altered cytidine deaminases (dACDs). A dACD includes a first protein and a second protein, wherein at least one of the first protein and the second protein is an altered cytidine deaminase. In some embodiments, the first protein is an altered cytidine deaminase, and the second protein is an altered cytidine deaminase. In some embodiments, the first protein is an altered cytidine deaminase, and the second protein is a wild-type cytidine deaminase. In some embodiments, the first protein is a wild-type cytidine deaminase, and the second protein is an altered cytidine deaminase.

[0192] The term “dimer” includes molecules which contain more than one polypeptide linked together. The more than one polypeptide can be joined by disulfide bonds, ionic bonds, or hydrophobic interactions, or complexes of polypeptides that are joined together, covalently or noncovalently, as dimers. The term polypeptide refers to a linear organic polymer comprising a large number of amino-acid residues bonded together in a chain, forming part of (or the whole of) a protein molecule. The terms peptide, oligopeptide, and protein are all encompassed within the definition of polypeptide and these terms are used interchangeably. It should be understood that these terms do not connote a specific length of a polymer of amino acids, nor are they intended to imply or distinguish whether the polypeptide is produced using recombinant techniques, chemical or enzymatic synthesis, or is naturally occurring.

[0193] Typically, the first protein and the second protein are closely associated, and in one embodiment are covalently attached. Methods of covalently attaching a first and a second protein are described in greater detail herein. In some embodiments, however, the first protein and the second protein are associated via a strong noncovalent interaction such that they form a dimer in solution. In one such embodiment, the noncovalent interaction may be an interaction in which the dimer has aa K_{D} of at most 1 μM.

[0194] The “first protein” of a dimeric protein typically refers to the N-terminal protein, and the “second protein” of a dimeric protein typically refers to the C-terminal protein.

[0195] Briefly, a dACD may include one or two ACDs having any amino acid sequence described herein. Different combinations of ACDs may be advantageous in different embodiments depending on the desired catalytic activity and reaction conditions. Various combinations of exemplary dACDs are described in greater detail herein.

[0196] In some embodiments, the dACD is a homodimer, meaning that the first altered cytidine deaminase has an amino acid sequence that is identical to the amino acid sequence of the second altered cytidine deaminase. The amino acid sequence of an altered cytidine deaminase does not include domains such as linkers and purification tags (e.g., 6xHis). For example, a dACD including, from N-terminus to C-terminus, the amino acid sequence of SEQ ID NO:16, an amino acid linker (e.g., (G4S) 2 linker), the amino acid sequence of SEQ ID NO:16, and a 6xHis tag (i.e., HHHHHH, SEQ ID NO:200) would be considered to be a homodimeric ACD.

[0197] In some embodiments, the dACD is a heterodimer. A heterodimer is a dimer comprising a first altered cytidine deaminase having an amino acid sequence that is not identical to the second altered cytidine deaminase.

[0198] In some embodiments, a heterodimeric ACD includes a first altered cytidine deaminase and a second altered cytidine deaminase, wherein the first altered cytidine deaminase and the second altered cytidine deaminase have the same selectivity. As is described herein, different amino acid sequences may give rise to the same substrate selectivity, particularly when the differences in amino acid sequence are in regions not related to substrate selectivity (e.g., regions related to stability). As is described herein, dimerization of an altered cytidine deaminase having a particular substrate preference may improve selectivity for that substrate. Additionally or alternatively, dimerization of an altered cytidine deaminase having a particular substrate preference may improve processivity for that substrate.

[0199] Alternatively, it may be desirable to provide a dimerized altered cytidine deaminase (dACD) wherein each cytidine deaminase has a different substrate preference. Such dimers may desirably expand the activity of a cytidine deaminase. For example, a dACD including a first altered cytidine deaminase preferring 5mC and a second altered cytidine deaminase preferring 5hmC may result in a dimer active on both 5hmC and 5mC. In some embodiments, a heterodimeric ACD includes a first altered cytidine deaminase having a first selectivity and a second altered cytidine deaminase having a second selectivity. For example, the first altered cytidine deaminase may prefer 5mC and the second altered cytidine deaminase may prefer 5mC and 5hmC (i.e. a 5mC-selective and 5hmC-selective activity, respectively).

[0200] In some embodiments, a dACD may include an altered cytidine deaminase and wild-type cytidine deaminase. For example, a heterodimeric ACD may include an altered cytidine deaminase and a wild-type cytidine deaminase. The altered cytidine deaminase may have an engineered substrate preference, such as a preference for 5mC, and the wild-type cytidine deaminase may have a wild-type substrate preference, such as a preference for both C and modified C, such as 5mC.

[0201] Interestingly, the inventors have found that in some embodiments, it is desirable for a dACD to include a catalytically inactive ACD. A catalytically inactive ACD may include any number of mutations in addition to one or more mutations to the active site of the enzyme. One example of a catalytically inactivating mutation is glutamate 72 to alanine (E72A/Q), C101A, C106A, or a combination thereof.

[0202] In some embodiments, a dACD includes an ACD having one or more point mutations that modify the substrate specificity of the ACD. In some embodiments, both of the ACDs of the dACD include one or more point mutations that modify the substrate specificity of the ACD. The first ACD and the second ACD may include the same mutations or different mutations. In preferred embodiments, the first and/or second ACD are 5mC and 5hmC preferring deaminases.

[0203] In one example, a point mutation that modifies the substrate specificity of the ACD may include mutation of an amino acid at a position functionally equivalent to tyrosine 130 (Y130). Additionally or alternatively, a point mutation that modifies the substrate specificity of the ACD may include mutation of an amino acid at a position functionally equivalent to tyrosine 132 (Y132). Mutation of Y130 and/or mutation of Y132 to alter the activity of an ACD are described in greater detail herein.

[0204] In some example, the first, second or both ACD can have one or more point mutations that increase the 5mC selectivity of the deaminase. For example, the ACD may include a mutation at Y130, Y132, and D133 (e.g., Y130X₁, Y132X₂, D133W/C, preferably D133W, where X₁ and X₂ is an amino acid different from wild-type, for example, X₁ is selected from A, G, F, H, Q, M, N, K, V, D, E, S, C, P, T, preferably X₁ is selected from A or S; X₂ is selected from R, H, K, Q, preferably, H; and X₃ is selected from W or C, preferably W. Thus, in one embodiment, the first, second or both 5-mC selective ACD comprises Y130A/Y132H/D133W. In some embodiments, the 5-mC selective ACD comprises Y130X/Y132X/D133W and further comprises one or more, two or more, three or more, four or more, five or more, six or more, seven or more, eight or more, nine or more, ten or more of the stability-enhancing alterations described herein. Suitable positions include those stability-enhancing alterations from Table 3 or 4. Suitable examples of stability-enhancing substitutions can be found in Table 2A and 2B and can be combined in any number of combinations to provide improved stability. In some examples, the locations of amino acids in an APOBEC3A (SEQ ID NO:3) where substitution mutation result in increased stability include A112X, A126X, A139X, A148X, A185X, A192X, A59X, A87X, C106X, C161X, C171X, C34X, D145X, D156X, D163X, D167X, D177X, D180X, D41X, D77X, D85X, E109X, E116X, E138X, E157X, E38X, G105X, G108X, G188X, G25X, G27X, H119X, H11X, H16X, H182X, H29X, H51LX, 117X, I26X, 189X, K47X, K60X, L135X, L62X, L78X, M14X, M48X, N117X, N196X, N21X, N42X, P80X, Q115X, Q141X, Q169X, Q184X, R111X, R123X, R189X, R39X, R74X, R91X, S103X, S183X, S187X, S20X, S45X, T118X, T164X, T19X, T31X, T93X, V110X, V79X, L12X, D14X, T19X, G27X, R28X, E38X, F54X, H56X, N57X, Y67X, L73X, D77X, S81X, Y90X, 196X, S97X, C101X, F102X, W104X, C106X, A107X, L114X, V120X, L122X, R128X, Y136X, M142X, A146X, K159X, C161X, L186X, and any combination thereof where the position number designation is functionally equivalent to the position in a wild-type APOBEC3A (SEQ ID NO:3) and X is an amino acid substitution different from the wild-type amino acid at that position. As discussed above, one or more of these stabilizing mutations may be contemplated in combination. Specific examples of substitution mutations identified as stabilizing in different scaffolds are shown in Table 5.

[0205] In some examples, a dACD includes an ACD having one or more selectivity-enhancing alterations, including a mutation, a deletion, an insertion, or a combination thereof.

[0206] Examples of selectivity-enhancing alterations suitable for a dACD of the present disclosure provide 5mC and 5hmC-preferring dACDs (e.g., dACDs having an ACD comprising Y130X₁/Y132X₂ and D133X₃ described herein, for example Y130A/Y132H/D133V). In some embodiments, a dACD includes one or more ACDs further having one or more stability-enhancing alterations, including a mutation, a deletion, an insertion, or a combination thereof. Examples of stability-enhancing mutations suitable for a dACD of the present disclosure are listed in Table 5. In some embodiments, a dACD includes an ACD having one or more stability-enhancing alterations that are deletions. Examples of stability-enhancing deletions suitable for a dACD of the present disclosure are listed in Table 6.

[0207] One or both of the cytidine deaminases of a dACD may include the same stability-enhancing mutations. In some embodiments, one or both of the cytidine deaminases of a dACD may include a combination of stability-enhancing alterations, including but not limited to the specific examples shown in Tables 4, and 5.

[0208] In some embodiments, a dACD includes an ACD having one or more mutations to the dimerization interface. The dimerization interface may be positions which may interact between the two dimers. For example, possible mutation to the dimerization interface includes mutation to a position functionally equivalent to H16, R28, K30, H56, or K60. Examples of mutations to the dimerization interface are listed in Table 9 below.

TABLE 9
Dimerization interface mutants.

| Residue | Mutation |
|---|---|
| H16 | A, L, W, D |
| R28 | A, V |
| K30 | A |
| H56 | A, R |
| K60 | A, P, G, R |

[0209] Using any method of protein conjugation or co-translation, one primary result of protein dimerization as it is described herein is the increased proximity between two altered cytidine deaminases. The distance between the two ACDs in the dimers described herein is typically less than 100 angstrom (Å), less than 90 Å, less than 80 Å, less than 70 Å, less than 60 Å, less than 50 Å, or less than 40 Å.

[0210] In embodiments wherein the first ACD and the second ACD are not covalently attached, formation of a dimer may be confirmed using molecular techniques to determine protein size, such as circular dichroism, and non-denaturing PAGE. A dACD will have a larger molecular weight than a monomeric ACD. A dACD will typically have a larger molecular diameter than a monomeric ACD.

[0211] A dACD of the present disclosure may be identified by its function. For example, a dACD of the present disclosure may exhibit greater thermostability than a comparable monomeric ACD. As it is used herein, a “comparable” monomeric ACD refers to an ACD having the amino acid sequence of one (or both, in the case of homodimers) of the cytidine deaminases of the dACD. In some embodiments, a dACD of the present disclosure has an increased thermal melting point than a comparable monomeric ACD. A dACD may have a melting temperature that is at least 1° C., at least 2° C., at least 3° C., at least 4° C., at least 5° C., or at least 6° C. compared to a monomeric ACD. A suitable method of determining the melting temperature of an ACD described herein is by fluorimetry (see Examples 2 and 5, describing determination of melting temperature of a monomeric ACD that could also be applied to a dACD).

[0212] In some embodiments, the dACD has a higher reaction efficiency on one or more substrates, such as cytidine, 5-methyl cytidine, or 5-hydroxymethyl cytidine compared to a monomeric ACD. Reaction efficiency may be measured using an NGS-based quantitative deamination assay (see Example 12).

[0213] In some embodiments, the dACD has a greater substrate preference as compared to a monomeric ACD.

[0214] While many possible heterodimeric altered cytidine deaminases are possible, several variants of interest will be prepared and measured. Table 10 describes 40 dACD variants prepared in the backbone of SEQ ID NO:75 (see Example 12). The N-terminal ACD is catalytically inactive, either via introduction of E72 to A or via another inactivating mutation.

[0215] Table 10 describes 40 dACD variants prepared in the backbone of SEQ ID NO:75. The C-terminal ACD is catalytically inactive, either via introduction of E72 to A or via another inactivating mutation.

TABLE 10
Heterodimer altered cytidine deaminases
with an inactive N-terminus.

| N-term (inactive) | C-term (active) |
|---|---|
| A59/K60/61-68 | SEQ ID NO: 75 |
| Δ26-27 | SEQ ID NO: 75 |
| Δ104-105 | SEQ ID NO: 75 |
| A59/K60/61-68, Δ26-27 | SEQ ID NO: 75 |
| A59/K60/61-68, Δ104-105 | SEQ ID NO: 75 |
| A59/K60/61-68, Δ26-27, Δ104-105 | SEQ ID NO: 75 |
| Δ26-27, Δ104-105 | SEQ ID NO: 75 |
| Δ25-26 | SEQ ID NO: 75 |
| A59/K60/61-68, Δ25-26 | SEQ ID NO: 75 |
| A59/K60/61-68, Δ25-26, Δ104-105 | SEQ ID NO: 75 |
| Δ25-26, Δ104-105 | SEQ ID NO: 75 |
| Δ27-28 | SEQ ID NO: 75 |
| A59/K60/61-68, Δ27-28 | SEQ ID NO: 75 |
| A59/K60/61-68, Δ27-28, Δ104-105 | SEQ ID NO: 75 |
| Δ27-28, Δ104-105 | SEQ ID NO: 75 |
| Δ28-29 | SEQ ID NO: 75 |
| A59/K60/61-68, Δ28-29 | SEQ ID NO: 75 |
| A59/K60/61-68, Δ28-29, Δ104-105 | SEQ ID NO: 75 |
| Δ28-29, Δ104-105 | SEQ ID NO: 75 |
| Δ29-30 | SEQ ID NO: 75 |
| A59/K60/61-68, Δ29-30 | SEQ ID NO: 75 |
| A59/K60/61-68, Δ29-30, Δ104-105 | SEQ ID NO: 75 |
| Δ29-30, Δ104-105 | SEQ ID NO: 75 |
| Σ24-31: VRWAKGRRE | SEQ ID NO: 75 |
| Σ24-31: EPWRGRHE | SEQ ID NO: 75 |
| Σ24-39: KRRLRRPYYPRKAL | SEQ ID NO: 75 |
| Σ24-31: VRWAKGRRE, | SEQ ID NO: 75 |
| A59/K60/61-68, Δ104-105 | |
| Σ24-31: EPWRGRHE, A59/K60/61- | SEQ ID NO: 75 |
| 68, Δ104-105 | |
| Σ24-39: KRRLRRPYYPRKAL, | SEQ ID NO: 75 |
| A59/K60/61-68, Δ104-105 | |
| Σ24-31: VRWAKGRRE, Δ104-105 | SEQ ID NO: 75 |
| Σ24-31: EPWRGRHE, Δ104-105 | SEQ ID NO: 75 |
| Σ24-39: KRRLRRPYYPRKAL, | SEQ ID NO: 75 |
| Δ104-105 | |

* A59/K60/61-68 = Reversion of A59P/K60R to A59 and K60, reintroduction of WT 61-68 loop.

TABLE 11
Heterodimer altered cytosine deaminases
with an inactive C-terminus.

| N-term (active) | C-term (inactive) |
|---|---|
| SEQ ID NO: 75 | A59/K60/61-68 |
| SEQ ID NO: 75 | Δ26-27 |
| SEQ ID NO: 75 | Δ104-105 |
| SEQ ID NO: 75 | A59/K60/61-68, Δ26-27 |
| SEQ ID NO: 75 | A59/K60/61-68, Δ104-105 |
| SEQ ID NO: 75 | A59/K60/61-68, Δ26-27, Δ104-105 |
| SEQ ID NO: 75 | Δ26-27, Δ104-105 |
| SEQ ID NO: 75 | Δ25-26 |
| SEQ ID NO: 75 | A59/K60/61-68, Δ25-26 |
| SEQ ID NO: 75 | A59/K60/61-68, Δ104-105 |
| SEQ ID NO: 75 | A59/K60/61-68, Δ25-26, Δ104-105 |
| SEQ ID NO: 75 | Δ25-26, Δ104-105 |
| SEQ ID NO: 75 | Δ27-28 |
| SEQ ID NO: 75 | A59/K60/61-68, Δ27-28 |
| SEQ ID NO: 75 | A59/K60/61-68, Δ104-105 |
| SEQ ID NO: 75 | A59/K60/61-68, Δ27-28, Δ104-105 |
| SEQ ID NO: 75 | Δ27-28, Δ104-105 |
| SEQ ID NO: 75 | Δ28-29 |
| SEQ ID NO: 75 | A59/K60/61-68, Δ28-29 |
| SEQ ID NO: 75 | A59/K60/61-68, Δ104-105 |
| SEQ ID NO: 75 | A59/K60/61-68, Δ28-29, Δ104-105 |
| SEQ ID NO: 75 | Δ28-29, Δ104-105 |
| SEQ ID NO: 75 | Δ29-30 |
| SEQ ID NO: 75 | A59/K60/61-68, Δ29-30 |
| SEQ ID NO: 75 | A59/K60/61-68, Δ104-105 |
| SEQ ID NO: 75 | A59/K60/61-68, Δ29-30, Δ104-105 |
| SEQ ID NO: 75 | Δ29-30, Δ104-105 |
| SEQ ID NO: 75 | Σ24-31: VRWAKGRRE |
| SEQ ID NO: 75 | Σ24-31: EPWRGRHE |
| SEQ ID NO: 75 | Σ24-39: KRRLRRPYYPRKAL |
| SEQ ID NO: 75 | Σ24-31: VRWAKGRRE, A59/K60/61-68, |
| | Δ104-105 |
| SEQ ID NO: 75 | Σ24-31: EPWRGRHE, A59/K60/61-68, |
| | Δ104-105 |
| SEQ ID NO: 75 | Σ24-39: KRRLRRPYYPRKAL, A59/K60/61- |
| | 68, Δ104-105 |
| SEQ ID NO: 75 | Σ24-31: VRWAKGRRE, Δ104-105 |
| SEQ ID NO: 75 | Σ24-31: EPWRGRHE, Δ104-105 |
| SEQ ID NO: 75 | Σ24-39: KRRLRRPYYPRKAL, Δ104-105 |

* A59/K60/61-68 = Reversion of A59P/K60R to A59 and K60, reintroduction of WT 61-68 loop

### Fusion Proteins

[0216] In some embodiments, the dACD includes a fusion protein including an ACD. As it is used herein, a “fusion protein” describes a contiguously translated amino acid sequence including the amino acid sequences of more than one protein. In some embodiments, a fusion protein including an ACD includes a ACD covalently attached to a second cytidine deaminase. Typically, one or both of the cytidine deaminases are ACDs. However, in some embodiments, one of the cytidine deaminases is a wild-type cytidine deaminase.

[0217] A fusion protein including a dACD may include one or more linkers. In particular, a fusion protein may include an amino acid linker between the first cytidine deaminase and the second cytidine deaminase. The properties of the amino acid linker can be used to control the interaction between the first and second cytidine deaminases.

[0218] In some embodiments, the dACD includes a flexible linker. Typically, flexible amino acid linkers include amino acids having relatively small side chains. Flexible linkers can provide a certain degree of movement or interaction giving the two ACD domains flexibility. Regarding the amino acid composition of the linkers, peptides are selected that do not interfere with the dimerization of the two polypeptides. For example, linkers comprising glycine and serine residues generally provide protease resistance. The amino acid sequence of the linkers can be optimized, for example, by phage-display methods.

[0219] Flexible linkers most commonly can be composed of small, non-polar (e.g., Gly) or polar (e.g., Ser or Thr) amino acids. A flexible linker can have sequences consisting primarily of stretches of Gly and Ser residues (“GS” linker). A non-limiting example of a flexible linker can have the sequence of (G₄S)n (G₄(SG₄)1 shown in SEQ ID NO:261), (SG₄)n (SEQ ID NO: 262), G₄ (SG₄)n (SEQ ID NO:263), wherein n can be 1-10, preferably wherein n is 1, 2, 3, 4, 5, 6, 7, 8, 9, or 10. By adjusting the copy number “n”, the length of this exemplary GS linker can be optimized to achieve appropriate separation of functional domains, or to maintain necessary inter-domain interactions. Other GS linkers include, but are not limited to, (GGSGGS) n (SEQ ID NO: 260), (GGSG) n, or (GGSGG) n (SEQ ID NO:219), wherein n is 1-10, preferably wherein n can be 1, 2, 3, 4, 5, 6, 7, 8, 9, or 10.

[0220] Besides GS linkers, other flexible linkers can be utilized for dimers. In some embodiment, a flexible linker can have the sequence of (Gly) n, wherein n can be 6, 7, or 8. In some cases, flexible linkers can also be rich in small or polar amino acids such as Gly and Ser, but can contain additional amino acids such as Thr and Ala to maintain flexibility. In other cases, polar amino acids such as Lys and Glu can be used to improve solubility. Thus, other suitable linkers may include, for example, GERP/GEKP/GQRP/GQKP or those disclosed in WO99/45132. For example, other linkers include, but are not limited to, GSPGSSSSGS (SEQ ID NO: 235), DPGGGGSGGGGSNPGS (SEQ ID NO:236), GGGGSGGGGSGSDPGS (SEQ ID NO: 237), DPGSGGGGSGGGGSGS (SEQ ID NO:238), GGGGSGGGGSGGGGSDPGS (SEQ ID NO: 239), DPGSGGGGSGGGGSGGGGS (SEQ ID NO:240), DPGSGSVPLGSGSNPGS (SEQ ID NO:241), DPGSGGSVPLGSGGSNPGS (SEQ ID NO:242), DPGVLEREDKPTTSKPNPGS (SEQ ID NO:243), DPGVLEREDVPTTSYPNPGS (SEQ ID NO: 244), DPGVLEREDKVTTSKYNPGS (SEQ ID NO:245), DPVLEREDKVTTSKNPGS (SEQ ID NO:246), DIEGRMD (SEQ ID NO:247), GEGKSSGSGSESKAS (SEQ ID NO: 248),GSTSGSGKPGSGEGSTKG (SEQ ID NO:249), GGGGSGGGGS (SEQ ID NO:267), SGGGGSGGGG (SEQ ID NO:250), GGGGSGGGGSGGGG (SEQ ID NO:251), GSPGSSSSGS (SEQ ID NO:235), GGGGSGGGGSGGGGSGGGGS (SEQ ID NO:253), GSGSGNGS (SEQ ID NO: 254), GGSGSGSG (SEQ ID NO:255), GGSGSG (SEQ ID NO:256), GGSG, GGSGNGSG (SEQ ID NO:257), GGNGSGSG (SEQ ID NO:258), and GGNGSGA(EAAAK)₄ALEA(EAAAK)₄A, (EAAAK) n (SEQ ID NO:259), n=1-6, among others.

[0221] In some embodiments, the protein linker includes the amino acid sequence: DSGGSSGGSSGSETPGTSESATPESSGGSSGGS (SEQ ID NO:266).

[0222] In some embodiments, the protein linker includes the amino acid sequence: GGGGSGGGGS (SEQ ID NO:267).

[0223] In some embodiments, the protein linker includes the amino acid sequence: KESGSVSSEQLAQFRSLD (SEQ ID NO:268).

[0224] In some embodiments, the protein linker includes the amino acid sequence: EGKSSGSGESKST (SEQ ID NO:264).

[0225] In some embodiments, the protein linker includes the amino acid sequence: GSAGSAAGSGEF (SEQ ID NO:269).

[0226] In some embodiments, the protein linker is a rigid linker. Rigid linkers may advantageously improve catalytic activity in some embodiments. Some rigid linkers form alpha helices. An example of a rigid linker that forms an alpha helix is the amino acid sequence A(EAAAK)ₙ, wherein n is typically 2, 3, 4, or 5 (SEQ ID NO:252). Some rigid linkers include a high percent composition of proline.

[0227] A fusion protein may include one or more additional amino acid sequences to confer additional properties to the fusion protein. For example, a fusion protein may include an affinity tag for protein purification, such as a His-tag (e.g., a 6xHis, SEQ ID NO:220) or a FLAG™ tag (SEQ ID NO:218).

### Bioconjugation Protein Domains

[0228] In some embodiments, the fusion protein includes a first protein including a first dimerization domain and a first altered cytidine deaminase and a second protein including a second dimerization domain and a second altered cytidine deaminase.

[0229] In some embodiments, the dACD includes a first fusion protein including a first ACD including a first protein dimerization domain. The dACD may include a second fusion protein including a second ACD including a second protein dimerization domain.

[0230] The dimerization domain may include the proteins of the SpyCatcher/SpyTag™ (SEQ ID NOs: 226-227) dimerization pair. (Zakeri et al. 2012, Proc Natl Acad Sci 109 (12) E690-E697). To use this dimerization pair, the first ACD can be attached to SpyCatcher and the second ACD can be attached to SpyTag. Preferably, the first ACD is provided as a first fusion protein with SpyCatcher and the second ACD is provided as a second fusion protein with SpyTag. When the first fusion protein and the second fusion protein are mixed under physiological conditions, Spy Tag and SpyCatcher form an isopeptide bond, covalently linking the first ACD to the second ACD. Advantageously, SpyTag and SpyCatcher may be fused to either terminus or between the termini of a protein, such as an ACD. Similar systems of proteins that form a strong covalent bond and can be used to create a covalent dimer of two proteins such as ACDs are known to the art. Examples of such proteins include the SnoopCatcher/SnoopTag system (SEQ ID NOs: 228-229).

[0231] Similar bioconjugation pairs exist that do not form covalent bonds, but strongly associate two proteins via their interaction. Examples of such bioconjugation pairs include GFP1-10 (SEQ ID NO:230) and GFP11 (SEQ ID NO:231), LgBit/HiBit™ (SEQ ID NOs: 232-233), leucine zippers (SEQ ID NO:234), and the Avi-tag™ (SEQ ID NO:212).

### Chemical Linkage

[0232] In some embodiments, the dACD includes more than one cytidine deaminase attached via a chemical linkage. In some such embodiments, a first protein may include a first cytidine deaminase and a second protein may include a second cytidine deaminase. The first protein may be expressed separately from the second protein. One or both of the first cytidine deaminase and the second cytidine deaminase may include an ACD. Methods of conjugating a first cytidine deaminase and a second cytidine deaminase to form a dACD are described in greater detail herein.

Polynucleotides Encoding Methyltransferases, ACDs and/or dACDs

[0233] Methyltransferases, such as cytosine-specific methyltransferases and altered methyltransferases, ACDs, and dACDs described herein also may be identified in terms of the polynucleotide that encodes the one or more proteins. Thus, this disclosure provides polynucleotides that encode a methyltransferase, an ACD, or a dACD described herein or hybridize, under standard hybridization conditions, to a polynucleotide that encodes a methyltransferase, an ACD, or a dACD described herein, and the complements of such polynucleotide sequences.

[0234] A polynucleotide as described herein can include any polynucleotide that encodes a methyltransferase, an ACD, and/or a dACD of the present disclosure. Thus, the nucleotide sequence of the polynucleotide may be deduced from the amino acid sequence that is to be encoded by the polynucleotide. A protein, such as a methyltransferase, an ACD, or a dACD, can be encoded by multiple codons, and certain translation systems (e.g., prokaryotic or eukaryotic cells) often exhibit codon bias, e.g., different organisms often prefer one of the several synonymous codons that encode the same amino acid. As such, polynucleotides presented herein are optionally “codon optimized,” meaning that the polynucleotides are synthesized to include codons that are preferred by the particular translation system being employed to express the protein. For example, when it is desirable to express the protein in a bacterial cell (or even a particular strain of bacteria), the polynucleotide can be synthesized to include codons most frequently found in the genome of that bacterial cell, for efficient expression of the protein. A similar strategy can be employed when it is desirable to express the protein in a eukaryotic cell, e.g., the nucleic acid can include codons preferred by that eukaryotic cell.

[0235] A polynucleotide described herein may also, advantageously, be included in a suitable expression vector to express the protein encoded therefrom in a suitable host. Incorporation of cloned DNA into a suitable expression vector for subsequent transformation of a host cell and subsequent selection of the transformed cells is well known to those skilled in the art as provided in Sambrook et al. (1989), Molecular cloning: A Laboratory Manual, Cold Spring Harbor Laboratory. Suitable host cells include, but are not limited to, E. coli and S. cerevisiae.

[0236] Such an expression vector includes a vector having a polynucleotide described herein operably linked to heterologous regulatory sequences, such as promoter regions, that are capable of effecting expression of said DNA fragments. The term “operably linked” refers to a juxtaposition wherein the components described are in a relationship permitting them to function in their intended manner. Such vectors may be transformed into a suitable host cell to provide for the expression of an altered cytidine deaminase.

[0237] The nucleic acid molecule may encode a mature protein or a protein having a pro-sequence, including that encoding a leader sequence on the preprotein which is then cleaved by the host cell to form a mature protein. The vectors may be, for example, plasmid, virus or phage vectors provided with an origin of replication, and optionally a promoter for the expression of said nucleotide and optionally a regulator of the promoter. The vectors may contain one or more selectable markers, such as, for example, an antibiotic resistance gene.

[0238] Regulatory elements required for expression include promoter sequences to bind RNA polymerase and to direct an appropriate level of transcription initiation and also translation initiation sequences for ribosome binding. For example, a bacterial expression vector may include a promoter such as the lac promoter and for translation initiation the Shine-Dalgarno sequence and the start codon AUG. Similarly, a eukaryotic expression vector may include a heterologous or homologous promoter for RNA polymerase II, a downstream polyadenylation signal, the start codon AUG, and a termination codon for detachment of the ribosome. Such vectors may be obtained commercially or be assembled from the sequences described by methods well known in the art.

[0239] Transcription of DNA encoding a methyltransferase, an ACD, or a dACD may be optimized by including an enhancer sequence in the vector. Enhancers are cis-acting elements of DNA that act on a promoter to increase the level of transcription. Vectors will also generally include origins of replication in addition to the selectable markers.

Making and Isolating Methyltransferase, ACDs and/or dACDs

[0240] Generally, polynucleotides encoding a methyltransferase and/or an ACD as presented herein can be made by cloning, recombination, in vitro synthesis, in vitro amplification and/or other available methods. A variety of recombinant methods can be used for expressing an expression vector that encodes a methyltransferase and/or an ACD presented herein. Methods for making recombinant polynucleotides, expression, and isolation of expressed products are well known and described in the art.

[0241] Polynucleotides encoding wild type cytidine deaminases can be obtained from a source and subjected to mutagenesis to introduce one or more substitution mutations described herein. In general, any available mutagenesis procedure can be used for making an ACD described herein. Polynucleotides encoding wild type methyltransferases can be obtained from a source and optionally subjected to mutagenesis to introduce one or more substitution mutations described herein. In general, any available mutagenesis procedure can be used for making an altered methyltransferase described herein. Procedures that can be used include, but are not limited to: site-directed point mutagenesis, in vitro or in vivo homologous recombination, oligonucleotide-directed mutagenesis, mutagenesis by total gene synthesis, and many others known to persons skilled in the art.

[0242] Additional useful references for mutation, recombinant, and in vitro nucleic acid manipulation methods (including cloning, expression, PCR, and the like) include Berger and Kimmel, Guide to Molecular Cloning Techniques, Methods in Enzymology volume 152 Academic Press, Inc., San Diego, Calif. (Berger); Kaufman et al. (2003) Handbook of Molecular and Cellular Methods in Biology and Medicine Second Edition Ceske (ed) CRC Press (Kaufman); The Nucleic Acid Protocols Handbook Ralph Rapley (ed) (2000) Cold Spring Harbor, Humana Press Inc (Rapley); Chen et al. (ed) PCR Cloning Protocols, Second Edition (Methods in Molecular Biology, volume 192) Humana Press; and in Viljoen et al. (2005) Molecular Diagnostic PCR Handbook Springer, ISBN 1402034032.

[0243] In addition, many kits are commercially available for the purification of plasmids or other relevant nucleic acids from cells. An isolated polynucleotide can be further manipulated to produce other polynucleotides, used to transfect or transform cells, incorporated into related vectors and introduced into cells for expression, and/or the like. Typical cloning vectors contain transcription and translation terminators, transcription and translation initiation sequences, and promoters useful for regulation of the expression of the particular target nucleic acid. The vectors optionally include generic expression cassettes containing at least one independent terminator sequence, sequences permitting replication of the cassette in eukaryotes, or prokaryotes, or both, (e.g., shuttle vectors) and selection markers for both prokaryotic and eukaryotic systems. Vectors are suitable for replication and integration in prokaryotes, eukaryotes, or both.

[0244] Other useful references, e.g., for cell isolation and culture (e.g., for subsequent nucleic acid isolation) include Freshney (1994) Culture of Animal Cells, a Manual of Basic Technique, third edition, Wiley-Liss, New York and the references cited therein; Payne et al. (1992) Plant Cell and Tissue Culture in Liquid Systems John Wiley & Sons, Inc. New York, N.Y.; Gamborg and Phillips (eds) (1995) Plant Cell, Tissue and Organ Culture; Fundamental Methods Springer Lab Manual, Springer-Verlag (Berlin Heidelberg New York); and Atlas and Parks (eds) The Handbook of Microbiological Media (1993) CRC Press, Boca Raton, Fla. Construction of vectors containing a nucleic acid encoding an ACD described herein employs standard ligation techniques known in the art. See, e.g., Sambrook et al, Molecular Cloning: A Laboratory Manual., Cold Spring Harbor Laboratory Press (1989) or Ausubel, R.M., ed. Current Protocols in Molecular Biology (1994).

[0245] A variety of protein isolation and detection methods are known and can be used to isolate a methyltransferase, an ACD, a dACD, or a combination thereof e.g., from recombinant cultures of cells expressing the recombinant methyltransferase or cytidine deaminase presented herein. A variety of protein isolation and detection methods are well known in the art, including, e.g., those set forth in R. Scopes, Protein Purification, Springer-Verlag, N.Y. (1982); Deutscher, Methods in Enzymology Vol. 182: Guide to Protein Purification, Academic Press, Inc. N.Y. (1990); Sandana (1997) Bioseparation of Proteins, Academic Press, Inc.; Bollag et al. (1996) Protein Methods, 2^{nd} Edition Wiley-Liss, NY; Walker (1996) The Protein Protocols Handbook Humana Press, NJ, Harris and Angal (1990) Protein Purification Applications: A Practical Approach IRL Press at Oxford, Oxford, England; Harris and Angal Protein Purification Methods: A Practical Approach IRL Press at Oxford, Oxford, England; Scopes (1993) Protein Purification: Principles and Practice 3^{rd} Edition Springer Verlag, NY; Janson and Ryden (1998) Protein Purification: Principles, High Resolution Methods and Applications, Second Edition Wiley-VCH, NY; and Walker (1998) Protein Protocols on CD-ROM Humana Press, NJ; and the references cited therein. Additional details regarding protein purification and detection methods can be found in Satinder Ahuja ed., Handbook of Bioseparations, Academic Press (2000).

[0246] A methyltransferase, an ACD, or a dACD protein or polynucleotide can be isolated. An “isolated” protein or polynucleotide is one that has been removed from a cell. For instance, an isolated protein is a polypeptide that has been removed from the cytoplasm or from the membrane of a cell, and many of the proteins, nucleic acids, and other cellular material of its natural environment are no longer present. Proteins that are produced outside of a cell, e.g., through chemical or recombinant means, are considered to be isolated by definition, as they were never present in a cell.

[0247] One method of producing fusion proteins, such as dACDs, is cotranslation of the two proteins from a single open reading frame. Using this method, a nucleic acid is provided that encodes the first monomer and the second monomer in the same open reading frame, typically attached from N-terminus to C-terminus. Typically, a protein linker is included between the first and second proteins. The protein linker is translated simultaneously with the first and second proteins, resulting in an amino acid sequence including the first protein's amino acid sequence, the sequence of the linker, and the second protein's amino acid sequence. Sequences of suitable amino acid linkers are described in greater detail herein.

[0248] In some embodiments, a dACD includes a protein linker between the first and the second cytidine deaminase. The protein linker may have any suitable sequence. Typically, the protein linker includes 5 to 50 amino acids, such as 10 to 40 amino acids or 20 to 35 amino acids. In some preferred embodiments, the protein linker includes 32 amino acids.

[0249] An ACD protein or polynucleotide can be isolated. An “isolated” protein or polynucleotide is one that has been removed from a cell. For instance, an isolated protein is a polypeptide that has been removed from the cytoplasm or from the membrane of a cell, and many of the proteins, nucleic acids, and other cellular material of its natural environment are no longer present. Proteins that are produced outside of a cell, e.g., through chemical or recombinant means, are considered to be isolated by definition, as they were never present in a cell.

### Chemical Conjugation

[0250] In some embodiments, a dACD is prepared by chemically conjugating a first cytidine deaminase to a second cytidine deaminase. Prior to conjugation, the first cytidine deaminase and the second cytidine deaminase may include a pair of cooperative reactive handles. Following conjugation, the conjugated dACD may include the reaction product of the pair of cooperative reactive handles.

[0251] Cooperative handles are two or more reactive handles (Rh) that, when exposed to each other under favorable reaction conditions, undergo a conjugation reaction to form a reaction product between the reactive handles. Any pair of cooperative reactive handles may be used to form the conjugates. Examples of cooperative handles include an activated ester and an amine; an amine and an NHS-ester; a hydroxyl and an NHS-ester; a hydroxyl and an epoxide; an acyl chloride and an amine; an acyl chloride and an alcohol; an amine and an epoxide; a thiol and an epoxide; a thiol and a maleimide; a disulfide and a thiol; an azide and an alkyne (azide and a linear alkyne in the presence of Cu (I); an azide and a cyclic alkyne such as cyclooctyne, difluorinated cyclooctyne, dibenxocyclooctyne, TMTH-Sulfoximine, biarylazacyclooctynone, aryl-less cyclooctyne, or bicyclo[6.1.0]nonyne); an amine and an isocyanate; an amine and an isothiocyanate, a amine and a benzoyl fluoride; a thiol and a iodoacetamide; a thiol and a bromoacetamide; a disulfide and 2-thiopyridine; a thiol and 3-arylpropiolonitirle; a phenol and a diazonium salt; a phenol and 4-phenyl-1,2,4-triazoline-3,5-dione; a phenol and aldehyde, and a aniline; a hydroxyl and sodium periodate; a thiol and an iodoacetamide; an amine and a pyridoxal phosphate; an azide and a functionalized triphenyl phosphine; a tetrazine and a strained alkene; and the like.

[0252] Examples of individual reactive handles that may be used to form the conjugates include Rh^{A} (hydroxyl), Rh^{B} (thiol), Rh^{C} (amine), Rh^{D} (activated ester), Rh^{E} (azide), Rh^{F} (alkyne), Rh^{G} (NHS-ester), Rh^{B} (maleimide), Rh^{I} (2-haloacetamides, where a halo group is a-chloro,-bromo, or -iodo leaving group attached to carbon that can undergo nucleophilic substitution; e.g., a bromoacetamide or iodoacetamide), Rh^{J} (azadibenzocyclooctyne (ADIBO or DBCO or DIBAC)), Rh^{K} (isocyanate), Rh^{L} (isothiocyanate), Rh^{M} (alkylhalides, where halide is a -chloro,-bromo, or iodo leaving group attached to carbon that can undergo nucleophilic substitution), Rh^{N} (an epoxide), Rh^{O} (an acyl chloride), Rh^{P} (an aldehyde) and isomers thereof. Chemical structures of Rh^{A}-Rh^{P} are depicted below.

[chemical structure]

[chemical structure]

[chemical structure]

[0253] X in Rh^{M} and Rh^{I} may be choro, bromo, or iodo.

[0254] Rh^{D} is an activated ester where AG is an activating group. An activated ester is an ester that is reactive with an activated ester cooperative reaction handle (e.g., an amine) in a conjugation reaction. Activated esters may be denoted as the type of activated ester or by the activating group. Examples of activating groups include O-acylisoureas, benzotriazoles (with a bond between the ester oxygen and one nitrogen of the triazole), and pentafluorophenyl or tetrafluorophenyl. In some embodiments, Rh^{D} may be an activated ester of a carboxylic acid. The activated ester can be formed through reaction of a carboxylic acid with one or more reagents that install the activating group. For example, a carboxylic acid may be converted into an activated ester having a O-acylisoureas activating group by treating the carboxylic acid with various carbodiimide reagents (e.g., N,N′-dicyclohexylcarbodiimide (DCC), 1-ethyl-3-(3-dimethylaminopropyl) carbodiimide (EDC), or diisopropylcarbodiimide (DIC)) under favorable reaction conditions. A carboxylic acid may be converted into an activated ester having a benzotriazole activating group by treating the carboxylic acid with various carbodiimide reagents followed by treatment with hydroxybenzotriazole (HOBT) or by treating the carboxylic acid with various benzotriazole containing compounds (e.g., O-(benzotriazol-1-yl)-N,N,N′,N′-tetramethyluronium hexafluorophosphate or 2-(1H-benzotriazol-1-yl)-1,1,3,3-tetramethyluronium hexafluorophosphate (HBTU); O-(benzotriazol-1-yl)-N,N,N′,N′-tetramethyluronium tetrafluoroborate (TBTU); benzotriazol-1-yloxy)tris(dimethylamino)phosphonium hexafluorophosphate (BOP); (benzotriazol-1-yloxy)tripyrrolidinophosphonium hexafluorophosphate (PyBOP); and O-(7-azabenzotriazol-1-y1)-N,N,N′,N′-tetramethyluronium tetrafluoroborate (TATU)) under favorable reaction conditions. Other reagents are available for making activated esters from carboxylic acids including bromotripyrrolidinophosphonium hexafluorophosphate (PyBrOP); O-(N-Succinimidyl)-1,1,3,3-tetramethyl-uronium tetrafluoroborate (TSTU); O-(5-Norbornene-2,3-dicarboximido)-N,N,N′,N′-tetramethyluronium tetrafluoroborate (TNTU); O-(1,2-Dihydro-2-oxo-1-pyridyl-N,N,N′,N′-tetramethyluronium tetrafluoroborate (TPTU); and 3-(diethylphosphoryloxy)-1,2,3-benzotriazin-4 (3H)-one (DEPBT); carbonyldiimidazole (CDI). In some embodiments, the activated ester may be created in situ from a carboxylic acid and not isolated prior to a conjugation reaction.

[0255] Reactive handles Rh^{A}, Rh^{B}, Rh^{C}, Rh^{P}, Rh^{E}, Rh^{F}, Rh^{G}, Rh^{H}, Rh^{I}, Rh^{J}, Rh^{K}, Rh^{L}, Rh^{M}, Rh^{N}, Rh^{O}, and Rh^{P} include various pairs of cooperative handles that can form the reaction products of Rp^{A}, Rp^{B}, Rp^{C}, Rp^{D}, Rp^{E}, Rp^{F}, Rp^{G}, Rp^{H}, Rp^{I}, Rp^{J}, and Rp^{K} (shown below). Such reaction products may also be referred to as bonding groups (M, as disclosed herein). In some embodiments, the conjugates include one or more of the reaction products Rp^{A}, Rp^{B}, Rp^{C}, Rp^{D}, Rp^{E}, Rp^{F}, Rp^{G}, Rp^{H}, Rp^{I}, Rp^{J}, and Rp^{K}.

[chemical structure]

[0256] For example, under favorable reaction conditions, a conjugation reaction between Rh^{A} and Rh^{D} forms Rp^{A} where U⁰ is O. Under favorable reaction conditions, a conjugation reaction between Rh^{D} and Rh^{C} forms Rp^{A} where U⁰ is NH. Under favorable reaction conditions, a conjugation reaction between Rh^{C} and Rh^{G} forms Rp^{A} where U⁰ is NH. Under favorable reaction conditions, a conjugation reaction between Rh^{B} and Rh^{H} forms Rp^{C} where U⁴ is S. Under favorable reaction conditions, a conjugation reaction between two Rh^{B} forms Rp^{D}. Under favorable reaction conditions, a conjugation reaction between Rh^{C} and Rh^{I} forms Rp^{H} where U⁶ is NH. Under favorable reaction conditions, a conjugation reaction between Rh^{B} and Rh^{I} forms Rp^{H} where U⁶ is S. Under favorable reaction conditions, a conjugation reaction between Rh^{M} and Rh^{B} forms Rp^{E} where U⁵ is S. Under favorable reaction conditions, a conjugation reaction between Rh^{M} and Rh^{C} forms Rp^{E} where U⁵ is NH. Under favorable reaction conditions, a conjugation reaction between Rh^{K} and Rh^{C} forms Rp^{B} where U¹ and U³ are NH and U² is O. Under favorable reaction conditions, a conjugation reaction between Rh^{L} and Rh^{C} forms Rp^{B} where U¹ and U³ are NH and U² is S. Under favorable reaction conditions, a conjugation reaction between Rh^{F} and Rh^{E} forms Rp^{F}. Under favorable reaction conditions, a conjugation reaction between Rh^{F} and Rh^{E} forms Rp^{G}. Under favorable reaction conditions, a conjugation reaction between Rh^{N} and Rh^{A} forms Rp^{I} or Rp^{J} where U⁷ is O. Under favorable reaction conditions, a conjugation reaction between Rh^{N} and Rh^{B} forms Rp^{I} or Rp^{J} where U⁷ is S. Under favorable reaction conditions, a conjugation reaction between Rh^{N} and Rh^{C} forms Rp^{I} or Rp^{J} where U⁷ is N. Under favorable reaction conditions, a conjugation reaction between Rh^{O} and Rh^{A} forms Rp^{A} where U⁰ is O. Under favorable reaction conditions, a conjugation reaction between Rh^{O} and Rh^{B} forms Rp^{A} where U⁰ is NH. Under favorable reaction conditions, a conjugation reaction between Rh^{P} and Rh^{C} forms Rp^{K}.

[0257] In some embodiments, the first cytidine deaminase includes one or more of the reactive handles disclosed herein capable of forming one or more of the reaction products disclosed herein. In some embodiments, the second cytidine deaminase includes one or more reactive handles disclosed herein capable of reaction with the reactive handle of a first cytidine deaminase disclosed herein to form a conjugate comprising a dACD disclosed herein.

[0258] In some embodiments, a first cytidine deaminase is conjugated to a second cytidine deaminase through a direct conjugation reaction. A direct conjugation reaction is a reaction in which the two components that are being covalently linked have the proper cooperative functional handles without the need for an intermediary bifunctional bioconjugation compound. Direct bioconjugation reactions can be accomplished using any suitable cooperative reaction handles, such as any of the cooperative functional handles disclosed herein, to result in the reaction products disclosed herein.

[0259] In some embodiments, a first cytidine deaminase is conjugated to a second cytidine deaminase using a bifunctional conjugation compound in an indirect bioconjugation reaction. An indirect bioconjugation reaction is the conjugation of two components through an intermediary bifunctional conjugation compound. A bifunctional conjugation compound includes a first reactive handle and a second reactive handle that are configured to react with cooperative functional handles on the components to be conjugated. Examples of pairs of reactive handles on a bifunctional bioconjugation compound include NHS-ester and an alkyne, a maleimide and an NHS-ester, an NHS ester and a disulfide, a dibenzocyclooctyne (DBCO) and an NHS ester, DBCO and a tetrafluophenyl ester, and the like. Indirect conjugation reactions often include two consecutive conjugation reactions; a first conjugation reaction to attach a first component to the bifunctional conjugation compound and a second conjugation reaction to attach the second component to the bifunctional conjugation compound. Generally, the two conjugation reactions are orthogonal. The first component has a reactive handle that is cooperative with a first reactive handle on the bifunctional conjugation compound, and the second component has a reactive handle that is cooperative with a second reactive handle on the bifunctional conjugation compound. Generally, the two pairs of cooperative functional handles allow for orthogonal conjugation reactions. Any conjugation chemistry and any two pairs of cooperative functional handles, such as cooperative reaction handles described herein, may be used. In some embodiments, where a delivery construct is conjugated to a cargo through a bifunctional conjugation compound, the bonding group (M) connecting the two components includes the reaction products of the two conjugation reactions and any chemical group of the bifunctional bioconjugation compound that separates the two reactive handles of the bifunctional bioconjugation compound.

### Methods of Use

[0260] The methyltransferases and cytosine-specific methyltransferases disclosed herein can be readily integrated into essentially any application for identifying modified cytosines. In particular, the methyltransferases and cytosine-specific methyltransferases disclosed herein can be easily integrated into workflows including cytidine deaminases.

[0261] A schematic of one example of a method 100 consistent with methods of the present disclosure is depicted in FIG. 26. The method 100 includes preparing a sample of DNA 110, treating the sample with a methyltransferase 120, treating the sample with an ACD 130, and preparing a sequencing library 140.

[0262] In one or more embodiments, preparing a DNA sample 110 includes providing a sample suspected of including DNA. A sample suspected of including DNA may be any sample described herein and/or commonly known in the art. In one or more embodiments, the sample may include but is not limited to a single cell, a mixture of cells, or cell-free DNA. In one or more embodiments, the sample may include a biological sample, such as a tissue or a fluid, such as blood or serum. Examples of samples that may be suitable for use with the methods are described throughout the application.

[0263] In one or more embodiments, preparing a DNA sample 110 includes treating the sample to provide single-stranded DNA. In one or more embodiments, the enzymes described herein have increased activity towards single-stranded DNA relative to double-stranded DNA.

[0264] In one or more embodiments, treating the sample with a methyltransferase 120 includes contacting the sample with the methyltransferase and one or more cofactors, such as XSAM.

[0265] In one or more embodiments, a method includes protecting at least one unmodified cytosine (C) in the target nucleic acid. In one or more embodiments, “protecting” includes adding a protective group to the unmodified C. For example, the protective group may be added to the 5 position as indicated in FIG. 2B. Typically, the protective group is any group sufficient to prevent an enzyme, such as a cytidine deaminase, from further modifying the C. In one or more embodiments, the protective group is a carboxymethyl group.

[0266] In one or more embodiments, protecting at least one unmodified C includes contacting the unmodified C with an enzyme, such as a methyltransferase. In one or more embodiments, protecting at least one unmodified C includes contacting the unmodified C with a cytosine-specific methyltransferase. In one or more embodiments, the method includes contacting the unmodified C with an enzyme including an amino acid sequence having at least 70%, at least 75%, at least 80%, at least 82%, at least 84%, at least 85%, at least 86%, at least 88%, at least 90%, at least 91%, at least 92%, at least 93%, at least 94%, at least 95%, at least 96%, at least 97%, at least 98%, or at least 99% sequence identity with SEQ ID NO: 140. In one or more embodiments, the method includes contacting the unmodified C with an enzyme including an amino acid sequence having at least 70%, at least 75%, at least 80%, at least 82%, at least 84%, at least 85%, at least 86%, at least 88%, at least 90%, at least 92%, at least 93%, at least 94%, at least 95%, at least 96%, at least 97%, at least 98%, or at least 99% sequence identity with SEQ ID NO: 141. In one or more embodiments, the method includes contacting the unmodified C with an enzyme including an amino acid sequence having at least 70%, at least 75%, at least 80%, at least 82%, at least 84%, at least 85%, at least 86%, at least 88%, at least 90%, at least 92%, at least 93%, at least 94%, at least 95%, at least 96%, at least 97%, at least 98%, or at least 99% sequence identity with SEQ ID NO:142. In one or more embodiments, the method includes contacting the unmodified C with an enzyme including an amino acid sequence having at least 70%, at least 75%, at least 80%, at least 82%, at least 84%, at least 85%, at least 86%, at least 88%, at least 90%, at least 92%, at least 93%, at least 94%, at least 95%, at least 96%, at least 97%, at least 98%, or at least 99% sequence identity with SEQ ID NO: 143.

[0267] The method may include contacting at least one unmodified C with any suitable concentration of the enzyme, such as the methyltransferase, such as the cytosine-specific methyltransferase. In embodiments including a methyltransferase, the methyltransferase typically has catalytic activity and therefore is provided in a catalytic amount, i.e., at a ratio of less than 1:1 methyltransferase to unmodified C. The enzyme may be provided in an amount of at least 1 nanomolar (nM), at least 2 nM, at least 3 nM, at least 4 nM, at least 5 nM, at least 6 nM, at least 7 nM, at least 8 nM, at least 9 nM, at least 10 nM, at least 12 nM, at least 14 nM, at least 15 nM, at least 16 nM, at least 18 nM, at least 20 nM, at least 25 nM, at least 30 nM, at least 40 nM, at least 50 nM, at least 60 nM, at least 70 nM, at least 80 nM, at least 90 nM, at least 100 nM, at least 150 nM, at least 200 nM, at least 250 nM, at least 300 nM, at least 350 nM, at least 400 nM, at least 450 nM, at least 500 nM, at least 550 nM, at least 600 nM, at least 650 nM, at least 700 nM, at least 750 nM, at least 800 nM, at least 850 nM, at least 900 nM, at least 950 nM, at least 1 micromolar (μM), at least 2 μM, at least 5 μM, at least 10 μM, at least 20 μM, at least 30 μM, at least 40 μM, at least 50 μM, at least 60 μM, at least 70 μM, at least 80 μM, at least 90 μM, at least 100 μM, at least 200 μM, at least 300 μM, at least 400 μM, at least 500 μM, at least 600 μM, at least 700 μM, at least 800 μM, at least 900 μM, or at least 1 millimolar (mM). In one embodiment the enzyme is provided in an amount of no greater than 10 mM.

[0268] Typically, the methyltransferases disclosed herein use a cofactor. Thus, in one or more embodiments, protecting at least one unmodified C includes contacting the unmodified C with a methyltransferase, such as a cytosine-specific methyltransferase and a cofactor. In one or more embodiments, the cofactor is SAM or XSAM. As is described in greater detail herein, “XSAM” refers to SAM including a protective group, wherein the protective group is represented by the “X.” The protective group may have any suitable identity. In one or more embodiments, the cofactor is carboxy-SAM. In one embodiment including a cofactor, the cofactor may be supplied in stoichiometric amount, i.e., at a ratio of more than 1:1 cofactor to unmodified C. The cofactor may be provided in an amount of at least 1 mM, at least 2 mM, at least 5 mM, at least 10 mM, at least 20 mM, at least 30 mM, at least 40 mM, at least 50 mM, at least 60 mM, at least 70 mM, at least 80 mM, at least 90 mM, at least 100 mM, at least 150 mM, at least 200 mM, at least 300 mM, at least 350 mM, at least 400 mM, at least 450 mM, at least 500 mM, at least 550 mM, or at least 600 mM. In one embodiment the cofactor is provided in an amount of no greater than 1,000 mM.

[0269] The method may include contacting the at least one unmodified C in a buffer. A buffer may include HEPES, phosphate buffered saline (PBS), MOPS, Tris buffered saline (TBS), a sodium acetate-acetic acid buffer, Tricene, or Bicene. The buffer may have any suitable pH. The buffer may include additional components to enhance enzymatic activity, such as magnesium (e.g., magnesium sulfate, magnesium chloride), bovine serum albumin (BSA), polyethylene glycol (PEG) at any suitable molecular weight, scavenger DNA, or glycerol.

[0270] In one or more embodiments, the at least one unmodified C is present in a target nucleic acid. Thus, in one or more embodiments, the method includes contacting a target nucleic acid with a methyltransferase, such as a cytosine-specific methyltransferase, and a cofactor, such as XSAM.

[0271] In one or more embodiments, the method includes contacting the target nucleic acid with a methyltransferase and a cofactor for at least one hour, at least two hours, at least three hours, at least four hours, at least five hours, at least six hours, at least seven hours, at least eight hours, at least nine hours, at least 10 hours, at least 11 hours, at least 12 hours, at least 13 hours, at least 14 hours, at least 15 hours, at least 16 hours, at least 17 hours, at least 18 hours, at least 19 hours, at least 20 hours, at least 21 hours, at least 22 hours, at least 23 hours, or at least 24 hours. In one or more embodiments, the method includes contacting the target nucleic acid with a methyltransferase and a cofactor for at most 48 hours, at most 40 hours, at most 35 hours, at most 30 hours, at most 24 hours, at most 20 hours, at most 18 hours, at most 16 hours, at most 14 hours, at most 12 hours, or at most 10 hours. In one or more embodiments, the method includes contacting the target nucleic acid with a methyltransferase and a cofactor for between 1 hour and 24 hours, such as for between 2 hours and 12 hours, or between 6 hours and 10 hours.

[0272] Advantageously, methods of the present disclosure may protect unmodified C without significantly increasing the complexity of the sample preparation method. In addition, treating a sample enzymatically, rather than chemically, may be less labor-intensive. Treating a sample enzymatically may result in less damage to the target nucleic acid, thereby requiring less input DNA. The ability to use less input DNA is an advantage in some applications such as the sequencing or single-cells and cell-free DNA. For example, using the methods of the present disclosure may allow a user to protect unmodified C using one enzymatic step, rather than using multiple labor-intensive chemical treatments.

[0273] In one or more embodiments, the method includes additional steps to inactivate or remove the methyltransferase following treating the sample with the methyltransferase. Methods to inactivate or remove the methyltransferase are known in the art. In one or more embodiments, the methyltransferase is inactivated using heat, such as by heating the sample to at least 37° C., at least 50° C., at least 60° C., at least 65° C., or at least 90° C. In one or more embodiments, the methyltransferase is inactivated by treating the sample with a proteinase, such as proteinase K. In one or more embodiments, the methyltransferase is inactivated by removing the methyltransferase from the reaction, for example, using an affinity tag.

[0274] In one or more embodiments, the method includes contacting the sample with the methyltransferase 120 prior to contacting the sample with an ACD 130. As is described herein, treating a sample with a methyltransferase may protect unmodified C in the sample from deamination by a cytosine deaminase, such as an ACD. Because the unmodified C are not deaminated by the cytosine deaminase, they may be interpreted as C during any subsequent sequencing steps. If the unmodified C are not protected, they will typically be deaminated by the cytosine deaminase and will be interpreted as T during any subsequent sequencing steps. Thus, treating a sample with a methyltransferase after treating the sample with a cytosine deaminase would typically not have the desired effect of interpreting nucleotides that were unmodified C in the original sample as C, rather than T, during sequencing. Specifically, following treatment with a cytosine deaminase, any nucleotides that were originally unmodified C would be T (i.e., deaminated C). Thus, even if the sample were to be treated with a methyltransferase following treatment with a methyltransferase, any deaminated C would be identified as T during sequencing.

[0275] Following treatment with an ACD 130, the sample may be used to prepare a sequencing library 140. Methods of preparing sequencing libraries are described in greater detail herein. Briefly, preparing a sequencing library may include amplifying the sample to add indices, performing quality control steps such as gel electrophoresis, and immobilizing the sample.

[0276] The ACDs provided by the present disclosure can be easily integrated into essentially any application for identifying modified cytosines. For instance, ACDs can be integrated into applications that include sequencing library preparation. Examples of sequencing library preparation include, but are not limited to, whole genome, accessible (e.g., ATAC), conformational state (e.g., HiC), and reduced representation bisulfite sequencing (RRBS). It can be particularly useful in essentially any application using low input DNA or RNA such as, but not limited to, cell free DNA-based methods and single cell combinatorial indexing (sci) methods like sci-WGS-seq, sci-MET-seq, and sci-ATAC-seq, sci-RNA-seq. Specific applications include, but are not limited to, identifying one or more patterns of cytosine modification such as determining methylation on CpG islands and reduced representation bisulfite sequencing (RRBS); variant calling, including SNV/indel, copy number variation (CNV), short tandem repeats (STR), and structural variants (SV); detecting differentially methylated regions (DMRs); measuring methylation at promoters; and detecting tumor DNA (International Application No. PCT/US2023/017846).

[0277] The ACDs provided by the present disclosure can be easily integrated into essentially any application that includes locus-specific methylation profiling. Typical locus-specific detection of epigenetic methylated cytosines, such as 5mC, require the use of 5mC-specific antibodies, or multi-step chemical or chemoenzymatic transformations that lead to deamination of C or 5mC to U/T to enable differentiation of the two C-isoforms. When combined with various in vitro detection methodologies, these approaches can be strong approaches to detect 5mC at defined loci. However, these methods can be confounded by antibody cross-reactivity and stability, or the toxicity and complex workflows required by chemical and chemoenzymatic approaches. Use of an ACD described herein in a single enzymatic deamination protocol permits selective conversion of 5mC to T that is compatible with a number of in vitro diagnostic modalities, resulting in locus-specific detection of 5mC.

[0278] Instead of using destructive methods for identifying methylated cytosines, integrating the ACDs provided by the present disclosure into methods for identifying modified cytosines, such as sequencing library production and locus-specific methylation profiling, results in the more efficient enzyme-catalyzed conversion of modified cytosines during generation of target nucleic acids, thereby permitting better sequencing data and better retention of genetic information, which is demonstrated by high variant calling performance (International Application No. PCT/US2023/017846). Furthermore, as an enzymatic method for conversion, the use of the ACDs enables high coverage uniformity and low sample damage, which results in lower nucleic acid input requirements. A multitude of sequencing library methods are known to a skilled person that can be used in the construction of whole-genome or targeted libraries

[0279] Use of an ACD or dACD described herein in a single enzymatic deamination protocol permits selective identification of 5hmC that is compatible with a number of in vitro diagnostic modalities, resulting in locus-specific detection of 5mC. Alternatively, multiples of the ACDs and/or dACDs of the present disclosure can be used in parallel to determine multiple types of methylated cytosines in a single sample. For example, an ACD or a dACD having activity toward 5mC and 5hmC can be used to detect presence of both 5mC and 5hmC in a first aliquot of a sample. If the sample is treated with only this dACD, one can determine that one of the two modified bases is present at a given locus. However, if a second aliquot of the sample is treated in parallel with an ACD or a dACD having activity toward 5mC only, the results of sequencing the first aliquot of the sample and the second aliquot of the sample can be compared to further distinguish 5mC from 5hmC.

[0280] In general, methods for using a methyltransferase and/or an ACD of the present disclosure include contacting target nucleic acids, e.g., DNA or RNA, with the enzyme, under conditions suitable for conversion of modified cytidines. Because amplification of DNA does not preserve the modification status of cytidine (e.g., the methylation status of 5mC and 5hmC is not retained), use of an ACD typically occurs before amplification of target DNA. Target nucleic acids can be contacted with a methyltransferase and/or an ACD at essentially any time in a method before an amplification, provided the DNA is single-stranded. For instance, target nucleic acids can be contacted with an ACD while the nucleic acids are inside a fixed or unfixed cell or nucleus, after isolation of genomic or cell free DNA or mRNA, before or after fragmentation, or before or after tagmentation. The skilled person will recognize that target nucleic acids can be contacted with ACD after addition of a universal sequence and/or an adapter, provided the universal sequence and/or an adapter is not added by amplification.

[0281] A method for using a methyltransferase and an ACD can include the optional step of comparison of the treated target nucleic acid with an untreated nucleic acid or comparison of the treated target nucleic acid with a nucleic acid treated with a wild type cytidine deaminase. For instance, in embodiments where the treated nucleic acid is sequenced, the sequence can be compared to a reference sequence thereby permitting easy identification of point mutations and inference of modified cytosines. Thus, in embodiments where an ACD having 5hmC-preferring activity is used, the presence of C to T point mutations can be easily identified, and the point mutations are inferred as 5hmC positions. In embodiments where the treated nucleic acid is not sequenced, the nucleic acid can be treated with an ACD and compared to the nucleic acid that is untreated, i.e., not contacted with an ACD. Here the read-out typically depends on the assay method, for instance when an amplification is used the relative amounts of amplification can be easily identified and the presence or absence of a 5hmC or a pattern of cytosine modification at a predetermined sequence inferred (International Application No. PCT/US2023/017846).

[0282] Reaction conditions suitable for conversion of modified cytidines, such as conversion of 5mC to T and/or 5hmC to 5hmU, by an ACD described herein include, but are not limited to, a substrate of target nucleic acid that is single-stranded (ss) DNA or RNA suspected of including at least one modified cytidine, buffer, pH, temperature of the reaction, time of the reaction, and concentration of the methyltransferase, concentration of the ACD and/or concentration of the ss DNA or RNA substrate. In one embodiment, double-stranded (ds) DNA can be denatured and exposed to a methyltransferase and/or an ACD. Methods for denaturing dsDNA are known and routine, and include heat treatment, chemical treatment, such as NaOH, formamide, DMSO, or N, N-dimethylformamide (DMF), or a combination thereof.

[0283] Target nucleic acids useful in the methods of the present disclosure are described herein. A modified cytidine present on a substrate single-stranded (ss) DNA or RNA includes, but is not limited to, 5-methyl cytosine (5mC), 5-hydroxymethyl cytosine (5hmC), 5-formyl cytosine (5fC), and 5-carboxy cytosine (5CaC) (FIG. 2A). In one embodiment, the modified cytidine is 5-methyl cytosine. In one embodiment, the modified cytidine is 5-hydroxymethyl cytosine. Methods that use double stranded target DNA for generating a sequencing library can be modified to include denaturation to convert the double stranded target DNA to ssDNA. In some embodiments, dsDNA that is used in a tagmentation reaction or for adapter attachment can be denatured and then treated with an ACD. Conditions for denaturation are known and routine. In those embodiments where ssDNA is contacted with an ACD and subsequently used in a process that requires dsDNA, e.g., addition of universal adapters by tagmentation or ligation, the ssDNA can be converted to dsDNA using routine methods.

[0284] In some embodiments, an ACD as presented herein can be used to differentiate between 5-methyl cytosine (5mC) and 5-hydroxymethyl cytosine (5hmC). In such an embodiment, a sample of DNA suspected of including single-stranded DNA comprising at least one 5-methyl cytosine (5mC) or 5-hydroxymethyl cytosine (5hmC) is modified to prevent an ACD from converting 5hmC to thymidine. Methods for blocking deaminase activity are known in the art, and any one of a number of methods can be used to protect 5hmC from deaminase activity. As one example, target DNA can be treated to modify 5hmC but not 5mC such that 5hmC is an unsuitable substrate for cytidine deaminase activity. In a specific example, a glucosyltransferase enzyme can be used to glucosylate 5hmC but not 5mC. Glucosyltransferase enzymes are known to those of skill in the art, and include, for example, β-glucosyltransferase (BGT). By way of example, the enzyme T4 β-glucosyltransferase is commercially available (BGT, NEB) and can be used for modification of 5hmC. Methods for using a BGT to glucosylate 5hmC are known in the art, and can be used in conjunction with the use of altered cytidine deaminase enzymes as presented here. For example, a sample of DNA can be treated with a BGT to glucosylate 5hmC in the sample DNA prior to treating the DNA with the altered cytidine deaminase enzyme. By treating the sample DNA with a BGT, 5hmC is protected from the deaminase activity of the altered cytidine deaminase enzyme. Thus, 5mC will be detected in downstream readout, such as sequencing, PCR, array, and the like, as a thymidine. In contrast, any protected 5hmC sites will be detected as cytosine in the same readout. Enzymes, buffers, and conditions for performing glucosylation of 5hmC are known in the art, as exemplified by the methods disclosed in Schutsky et al., Nature biotechnology, 10.1038/nbt.4204. 8 Oct. 2018, doi: 10.1038/nbt.4204.

[0285] In some embodiments, an ACD or dACD as presented herein can be used in in vitro diagnostic (IVD) approaches for profiling methylation in a locus-specific manner. Current methods for methylation biomarker detection typically include digestion of genomic DNA with methylation-sensitive enzymes and then quantitative PCR (qPCR) at a locus of interest to quantify the extent of restriction enzyme digestion, and therefore the percent methylation at that site. This is followed by mismatch-sensitive qPCR of bisulfite-treated DNA, where 5mC is read out as a lack of 5mC>T conversion. These methods, however, have drawbacks. The recognition site of the methyl-sensitive restriction enzyme must be present in the methylated region of the target locus. Bisulfite treatment requires a large quantity of starting DNA and results in conversion to a low complexity genome (unmethylated cytosines-which represent the majority of cytosines in the genome—are converted to U and read as T). This reduced complexity of the genomic template constrains the design of qPCR primers that hybridize specifically to the locus of interest. During bisulfite conversion, DNA is intrinsically damaged or lost, which can hinder downstream analysis. DNA damage decreases coverage uniformity of the genome, which can lead to bias coverage. Furthermore, incomplete bisulfite conversion has the potential to adversely affect results, since it can exaggerate DNA methylation levels (Sam et al., PLOS One. 2018; 13 (6); Ehrich et al., Nucleic Acids Res. Oxford University Press; 2007; 35: e29).

[0286] Methylation-sensitive enzymes also fail to identify and digest sites that contain 5hmC, and 5hmC to T conversion by an ACD described herein obviates the need for restriction enzymes or bisulfite treatment, and preserves DNA complexity. The resulting modifications of one or more cytosines can be detected using established in vitro diagnostic (IVD) approaches for profiling methylation in a locus-specific manner. Examples of approaches include detection of 5mC loci via amplification, e.g., quantitative PCT (qPCR), detection of 5mC loci using a CRISPR-based system, e.g., CRISPR-Cas12, spatial detection of 5mC using molecular cytogenic methods, e.g., fluorescence in situ hybridization (FISH), and array-based detection of 5mC (International Application No. PCT/US2023/017846). These methods of detecting 5mC can be easily used for detecting 5hmC; an ACD having 5hmC-preferring activity is used instead of an ACD having 5mC-preferring activity. In one embodiment, in vitro diagnostic (IVD) approaches for profiling methylation in a locus-specific manner use one or more primers to anneal to a predetermined sequence that may include one or more modified cytosines. After treatment of target nucleic acids with an ACD, the modified cytosines present in the target nucleic acids are converted as described herein (e.g., 5mC is converted to T), and primers can be easily designed to anneal with higher affinity to a predetermined sequence when it includes nucleotides resulting from the deaminase treatment (e.g., a T nucleotide where a 5hmC was present prior to treatment). For example, primers used for an amplification bind with greater affinity to a nucleic acid that includes T nucleotides where 5hmC nucleotides were present prior to treatment (International Application No. PCT/US2023/017846, incorporated by reference regarding primers). The annealing of a primer to a predetermined sequence that includes the expected 5mC to T conversion(s) allows one to infer the location of a modified cytosine in the untreated target nucleic acid. A primer that binds with greater affinity to a nucleic acid that includes T nucleotides where 5mC nucleotides were present prior to treatment can include at least 1, at least 2, at least 3, at least 4 or at least 5 nucleotides that will base-pair with a nucleotide that results from conversion of 5mC to T, i.e., an adenine (A), and when amplification is used, then a second primer for the reverse strand that has a T instead of guanine (G).

[0287] In some embodiments, target nucleic acids obtained from a subject can be treated with a methyltransferase and/or an ACD to result in converted nucleic acids, and a pattern of cytosine modification can be identified in the converted nucleic acids. The pattern of cytosine modification can optionally be compared with the pattern of cytosine modification in a reference nucleic acid. In embodiments where a pattern of cytosine modification correlates with a disease or condition, the method can be used in diagnostic or prognostic applications. For instance, the subject can have or be at risk of having a disease or condition, and the reference nucleic acid can be from a normal subject, e.g., a subject that does not have and is not at risk for the disease or condition. The pattern of cytosine modification can be associated with a disease or condition (e.g., the target nucleic acid can be a predetermined sequence), and identification in the subject of a pattern of cytosine modification associated with a disease or condition can indicate the subject has or is at risk of having the disease or condition. For instance, a pattern of cytosine modification can be linked in-cis to a coding region that is correlated with a disease or condition and identification of that pattern, or absence of that pattern, in the subject can be used for diagnosis or prognosis. In one embodiment, the coding region can be one that is transcriptionally active or transcriptionally inactive in a reference nucleic acid. The comparison of the converted nucleic acid to the reference nucleic acid can include determining if the pattern of cytosine modification of the converted nucleic acid indicates the coding region is transcriptionally active or transcriptionally inactive in the subject. When that coding region is associated with a disease or condition, the status of transcriptional activity can be used for diagnosis or prognosis.

[0288] Comparison of a pattern of cytosine modification in a subject can also be used in identifying changes in a pattern of cytosine modification in a subject over time. For instance, a subject can have a disease or conditions and is undergoing treatment, or a subject had a disease or condition and is cured (e.g., the subject was treated and no signs of the disease or condition are present) or in remission (e.g., the subject was treated and signs of the disease or condition are reduced). Target nucleic acids from the subject at different times, e.g., before treatment started, during treatment, after treatment is stopped, can be compared and a pattern of cytosine modification of a sequence, e.g., a predetermined sequence compared and used to determine the progress of a treatment or the status of the disease or condition in the subject.

[0289] In some embodiments where detection of 5mC or 5hmC nucleotides uses amplification, the use of a polymerase that disfavors uracil can aid in reducing the amplification of treated target nucleic acids that include spurious C to U conversion that may result from use of an ACD. B-family polymerases are known to exhibit “uracil read-ahead” function which causes stalling of the polymerase at uracil residues (Greagg et al., 1999, PNAS USA; 96 (16): 9045-50). Examples of B-family polymerases that disfavor uracil include archaeal B-family polymerases from Pyrococcus furiosus (Pfu), Thermococcus kodakarensis (KOD), Thermococcus litoralis (Tli/Vent), Pyrococcus woesei (Pwo), and Thermococcus fumicolans (Tfu). Other examples of uracil-disfavoring polymerases include Phusion™, Q5®, and Kapa HiFi™. In other embodiments where amplification of nucleic acids containing uracil nucleotides is desired, the use of a uracil tolerant polymerase can be used. Examples of uracil-tolerant polymerases include PhusionU™, Q5U®, KapaU™, Taq, and Dpo4.

[0290] Wild-type cytidine deaminases typically function at near-neutral pH, e.g., pH 7. ACDs described herein can have increased activity at below neutral pH. In some embodiments, the pH of a reaction that includes an ACD described herein can be no greater than pH 8, no greater than 7.8, no greater than 7.7, no greater than 7.6, no greater than 7.5, no greater than 7.4, no greater than 7.3, no greater than 7.2, no greater than 7.1, no greater than 7.0, no greater than pH 6.7, no greater than pH 6.5, no greater than pH 6.3, no greater than pH 6.1, no greater than pH 6.0. In some embodiments, the pH of a reaction that includes an ACD described herein can be at least pH 5.1, at least pH 5.3, at least pH 5.5, at least pH 5.7, at least pH 5.9, at least pH 6.1, at least pH 6.3, at least pH 6.5, at least pH 6.7, at least pH 6.9, at least pH 7.0, at least pH 7.1, at least pH 7.2, at least pH 7.3, at least pH 7.4, at least pH 7.5. In some embodiments, the pH of a reaction that includes an ACD described herein can be no greater than pH 7.5, no greater than pH 7.3, or no greater than pH 7.1. Examples of ranges of pH in a reaction include at least 6 to no greater than 8, at least 6.5 to no greater than 8, at least 7 to no greater than 8, or at least 6.9 to no greater than 7.6, e.g., pH of about 7.0 to about 7.5.

[0291] It is expected that an ACD can function in essentially any buffer. Examples of useful buffers include, but are not limited to: a citrate buffer, such as the citrate buffer available from Thermo Fisher Scientific (Cat. No. #005000); sodium acetate buffer, Bis Tris-Propane HCl; and Tris-HCl Tris. Examples of other buffers include, but are not limited to, Bicine, DIPSO, glycylglycine, HEPES, imidazole, malonate, MES, MOPS, PB, phosphate, PIPES, SPG, succinate, TAPS, TAPSO, tricine. In some embodiments a reducing agent such as dithiothreitol (DTT), TCEP, can be present. In some embodiments a divalent cation may be included, for example, Zinc. In some embodiments, a divalent cation is not included.

[0292] A deamination reaction can occur at a temperature of 25° C. to 75° C., such as 37 or 50° C. Suitable temperature ranges include from about 37° C. to 75° C., alternatively about 42° C. to 75° C., alternatively about 48° C.-75° C., about 50° C. to 75° C., alternatively about 50° C. to 65° C., and any temperature or range between. Some ACDs described herein preferentially deaminate a modified cytosine to thymidine at a faster rate than deamination of cytosine to uracil. Thus, in some embodiments the time of reaction can be used to maximize the difference of deamination of modified cytosine versus deamination of cytosine. In one embodiment, the reaction can proceed for at least 15 minutes, at least 30 minutes, at least 45 minutes, at least 60 minutes, at least 90 minutes, at least 120 minutes, or at least 150 minutes, and for no greater than 15 minutes, no greater than 30 minutes, no greater than 45 minutes, no greater than 60 minutes, no greater than 90 minutes, no greater than 120 minutes, no greater than 150 minutes, or no greater than 180 minutes.

[0293] In one embodiment, a deamination reaction can include an ACD at a concentration from at least 0.05 micromolar (μM) to no greater than 5 μM. For instance, the concentration of the enzyme can be at least 0.05, at least 0.1 μM, at least 0.2 μM, at least 0.3 μM, at least 0.4 μM, or at least 0.5 μM, at least 0.6 μM, at least 0.7 μM, at least 0.8 μM, at least 0.9 μM, at least 1.0 μM and/or no greater than 5 μM, no greater than 4 μM, no greater than 3 μM, no greater than 2 μM, no greater than 1 μM, or 0.5 μM. In one embodiment, a deamination reaction can include nucleic acids at a concentration of at least 1 picomolar (pM) to no greater than 2 μM. For instance, the concentration of nucleic acids can be at least 1 μM, at least 3 μM, at least 6 μM, at least 10 μM, at least 100 μM, at least 1 nanomolar (nM), at least 40 nM, at least 400 nM, at least 500 nM, at least, 600 nM, at least 700 nM, at least 800 nM, at least 900 nM, or 1 μM, and/or no greater than 1 μM, no greater than 900 nM, no greater than 800 nM, no greater than 700 nM, no greater than 600 nM, no greater than 500 nM, no greater than 400 nM, no greater than 40 nM, no greater than 1 nM, no greater than 100 nM, no greater than 6 nM, or no greater than 3 nM.

[0294] The substrate of an ACD described herein can be a single stranded nucleic acid, such as single stranded DNA (ssDNA). ssDNA is susceptible to the formation of secondary structure such as hairpins, which can reduce accessibility of reaction sites to an ACD and increase the production of false positives. Accordingly, some embodiments a method of using an ACD can include the use of one or more denaturant to reduce the formation of secondary structure. Examples of denaturants include DMSO and betaine.

[0295] Stability-enhancing substitution mutations increase the thermal melting point of an ACD, and increased temperature optimums are highly desirable because it decreases DNA secondary structures by opening reaction sites that would be otherwise inaccessible due to secondary structure resulting in decreased false positive rate; stabilizes the enzyme in reaction conditions, which permits longer incubations and increased conversion; increases reaction kinetics, which allows for more tightly controlled conditions; and improved characteristics for commercialization, including increased shelf life, robustness in the assay, manufacturability, etc.

[0296] In one embodiment, a deamination reaction can include an RNAse. RNase A has been implicated in increasing activity of cytidine deaminases (Bransteitter et al., Proceedings of the National Academy of Sciences of the United States of America 100, no. 7 (2003): 4102-7. doi.org/10.1073/pnas.0730835100). When activity of an ACD of the present disclosure was determined in the presence of RNAse A the opposite was observed. When RNAse A was included in the reaction, an ACD having cytosine-defective deaminase activity (i.e., converts 5mC to T at a greater rate than converting C to U) had reduced activity, and the reduced activity was more pronounced for off-target cytosine deamination. Thus, RNAse A resulted in greater selectivity for deamination of 5mC compared to C, and it is expected that RNAse A will result in greater selectivity for deamination of 5hmC as compared to C. An RNAse A can be included in a deamination reaction at a concentration from at least 1 microgram/milliliter (ug/ml) to no greater than 20 μM. For instance, the concentration of RNAse A can be at least 1 μg/ml, at least 2 μg/ml, at least 3 μg/ml, at least 4 μg/ml, 5 μg/ml, 6 μg/ml, 7 μg/ml, 8 μg/ml, or 9 μg/ml, and/or no greater than 50 μg/ml, no greater than 40 μg/ml, no greater than 30 μg/ml, no greater than 20 μg/ml, no greater than 19 μg/ml, no greater than 18 μg/ml, no greater than 17 μg/ml, no greater than 16 μg/ml, no greater than 15 μg/ml, no greater than 14 μg/ml, no greater than 13 μg/ml, no greater than 12 μg/ml, or no greater than 11 μg/ml. In one embodiment, the concentration of RNAse A is from 2 μg/ml to 13 μg/ml, or from 5 μg/ml to 10 μg/ml.

### Target Nucleic Acids

[0297] The target nucleic acids contacted with a methyltransferase and/or an ACD and used in the methods, compositions, and kits provided herein may be essentially any nucleic acid of known or unknown sequence. Sequencing may result in determination of the sequence of the whole or a part of the target molecule. In one embodiment, target nucleic acids can be processed into templates suitable for amplification by the placement of universal amplification sequences, e.g., sequences present in a universal adaptor, at the ends of each target fragment.

[0298] Target nucleic acids are typically derived from primary nucleic acids present in a sample, such as a biological sample. The primary nucleic acids may originate as DNA or RNA. DNA primary nucleic acids may originate in double-stranded DNA (dsDNA) form (e.g., genomic DNA, genomic DNA fragments, cell-free DNA, and the like) from a sample or may originate in single-stranded form from a sample. RNA primary nucleic acids may be mRNA or non-coding RNA, e.g., microRNA or small interfering RNA. The precise sequence of the polynucleotide molecules from a primary nucleic acid sample is generally not material to the disclosure and may be known or unknown.

[0299] The primary nucleic acid molecules may represent the entire genetic complement of an organism, e.g., genomic DNA molecules which include both intron and exon sequences, as well as non-coding regulatory sequences such as promoter and enhancer sequences. The primary nucleic acid molecules may represent the entire genetic complement of specific cells of an organism, e.g., from tumor cells, where the genomic DNA molecules which include both intron and exon sequences, as well as non-coding regulatory sequences such as promoter and enhancer sequences. In one embodiment, particular subsets of genomic DNA can be used, such as, for example, particular chromosomes, DNA associated with open chromatin, DNA associated with closed chromatin, or one or more specific sequences such as a region of a specific gene (e.g., targeted sequencing). In one embodiment, the primary nucleic acid molecules may represent a particular subset of DNA, e.g., DNA having a specific sequence that anneals with a primer such as one used for targeted sequencing or target enrichment. In one embodiment, a particular subset of DNA can be used, such as cell-free DNA, which can include DNA of the subject including DNA from normal cells, DNA from diseased cells such as tumor cells, and/or DNA from fetal cells.

[0300] The primary nucleic acid molecules may represent the entire transcriptome of cells of an organism, e.g., mRNA molecules. The primary nucleic acid molecules may represent the entire transcriptome of specific cells of an organism, e.g., from tumor cells or for instance the cells of a tissue. In one embodiment, the primary nucleic acid molecules may represent a particular subset of mRNA, e.g., mRNA having a specific sequence that anneals with a primer such as one used for targeted sequencing or target enrichment.

[0301] A sample, such as a biological sample, can include nucleic acid molecules obtained from biopsies, tumors, scrapings, swabs, blood, mucus, urine, stool, plasma, semen, hair, laser capture micro-dissections, surgical resections, and other clinical or laboratory obtained samples. In some embodiments, the sample can be an epidemiological, agricultural, forensic or pathogenic sample. In some embodiments, the sample can include cultured cells. In some embodiments, the sample can include nucleic acid molecules obtained from an animal such as a human or mammalian source. In another embodiment, the sample can include nucleic acid molecules obtained from a non-mammalian source such as a plant, bacteria, virus, or fungus. In some embodiments, the source of the nucleic acid molecules may be an archived or extinct sample or species.

[0302] Additional non-limiting examples of sources of biological samples can include whole organisms as well as a sample obtained from a patient. The biological sample can be obtained from any biological fluid or tissue and can be in a variety of forms, including fluid, e.g., liquid or gas, tissue, solid tissue, and preserved forms of such a fluid or tissue, such as dried, frozen, and fixed forms. The sample may be of any biological tissue, cells or fluid. Such samples include, but are not limited to, sputum, blood, serum, plasma, blood cells (e.g., white cells), ascitic fluid, urine, saliva, tears, sputum, vaginal fluid (discharge), washings obtained during a medical procedure (e.g., pelvic or other washings obtained during biopsy, endoscopy or surgery), tissue, nipple aspirate, core or fine needle biopsy samples, cell-containing body fluids, peritoneal fluid, and pleural fluid, or cells therefrom, and free floating nucleic acids such as cell-free circulating DNA. Biological samples may also include sections of tissues such as frozen or fixed sections taken for histological purposes or micro-dissected cells or extracellular parts thereof. In some embodiments, the sample can be a blood sample, such as, for example, a whole blood sample. In another example, the sample is an unprocessed dried blood spot (DBS) sample. In yet another example, the sample is a formalin-fixed paraffin-embedded (FFPE) sample. In yet another example, the sample is a saliva sample. In yet another example, the sample is a dried saliva spot (DSS) sample.

[0303] Exemplary biological samples from which target nucleic acids can be derived include, for example, those from a eukaryote, for instance a mammal, such as a rodent, mouse, rat, rabbit, guinea pig, ungulate, horse, sheep, pig, goat, cow, cat, dog, primate, human or non-human primate; a plant, such as Arabidopsis thaliana, corn, sorghum, oat, wheat, rice, canola, or soybean; an algae, such as Chlamydomonas reinhardtii; a nematode such as Caenorhabditis elegans; an insect, such as Drosophila melanogaster, mosquito, fruit fly, honey bee or spider; a fish, such as zebrafish; a reptile; an amphibian, such as a frog or Xenopus laevis; a Dictyostelium discoideum; a fungi, such as Pneumocystis carinii, Takifugu rubripes, yeast, Saccharamoyces cerevisiae, or Schizosaccharomyces pombe; or a protozoan such as Plasmodium falciparum. Target nucleic acids can also be derived from a prokaryote such as a bacterium, Escherichia coli, Staphylococcus or Mycoplasma pneumoniae; an archaeon; a virus such as Hepatitis C virus or human immunodeficiency virus; or a viroid. Target nucleic acids can be derived from a homogeneous culture or population of organisms described herein or alternatively from a collection of several different organisms, for example, in a community or ecosystem.

[0304] In some embodiments, a biological sample includes tissue that is processed to obtain the desired primary nucleic acids. In some embodiments, cells are used obtain the desired primary nucleic acids. In some embodiments, nuclei are used to obtain the desired primary nucleic acids. The method can further include dissociating cells, and/or isolating nuclei from cells. Methods for isolating cells and nuclei from tissue are available (WO 2019/236599).

[0305] In some embodiments, nucleic acids present in tissue, in cells, or in isolated nuclei can be processed depending on the desired read-out. For instance, nucleic acids can be fixed during processing, and useful fixation methods are available (WO 2019/236599). Fixation can be useful to preserve a sample or maintain contiguity of analytes from a sample, a cell, or a nucleus. Fixation methods preserve and stabilize tissue, cell, and nucleus morphology and architecture, inactivates proteolytic enzymes, strengthens samples, cells, and nuclei so they can withstand further processing and staining, and protects against contamination. Examples of methods where fixation can be useful include, but are not limited to, whole genome sequencing of isolated nuclei and chromosome conformation capture methods such as Hi-C. Common methods of fixation include perfusion, immersion, freezing, and drying (Srinivasan et al., Am J Pathol. 2002 December; 161 (6): 1961-1971.doi: 10.1016/S0002-9440 (10) 64472-0). In some embodiments such as whole genome sequencing, isolated nuclei can be processed to dissociate nucleosomes from DNA while leaving the nuclei intact, and methods for generating nucleosome-free nuclei are available (WO 2018/018008).

[0306] In some embodiments, primary nucleic acids in bulk, e.g., from a plurality of cells, can be used to produce a sequencing library as described herein. In other embodiments, individual cells or nuclei can be used as sources of primary nucleic acids to obtain sequence information from single cells and nuclei. Many different single cell library preparation methods are known in the art, including, but not limited to, Drop-seq, Seq-well, and single cell combinatorial indexing (“sci-”) methods. Companies providing single cell products and related technologies include, but are not limited to, Illumina, 10X Genomics, Takara Biosciences, BD Biosciences, Bio-Rad Laboratories, 1cellbio, Isoplexis, CellSee, NanoSelect, and Dolomite Bio. Sci-seq is a methodological framework that employs split-pool barcoding to uniquely label the nucleic acid contents of large numbers of single cells or nuclei. Typically, the number of nuclei or cells can be at least two. The upper limit is dependent on the practical limitations of equipment (e.g., multi-well plates, number of indexes) used in other steps of the methods as described herein. The number of nuclei or cells that can be used is not intended to be limiting and can number in the billions.

[0307] The target nucleic acids used in the methods and compositions of the present disclosure can be derived by fragmentation. Random fragmentation refers to the fragmentation of a polynucleotide molecule from a primary nucleic acid sample in a non-ordered fashion by enzymatic, chemical, or mechanical methods. Such fragmentation methods are known in the art and use standard methods (Sambrook and Russell, Molecular Cloning, A Laboratory Manual, third edition). Moreover, random fragmentation is designed to produce fragments irrespective of the sequence identity or position of nucleotides comprising and/or surrounding the break. In one embodiment, the random fragmentation is by mechanical means such as nebulization or sonication to produce fragments of about 50 base pairs in length to about 1500 base pairs in length, still more particularly 50-700 base pairs in length, yet more particularly 50-400 base pairs in length. Most particularly, the method is used to generate smaller fragments of from 50-150 base pairs in length.

[0308] Fragmentation of polynucleotide molecules by mechanical means (nebulization, sonication, and Hydroshear, for example) results in fragments with a heterogeneous mix of blunt and 3′- and 5′-overhanging ends. It is therefore desirable to repair the fragment ends using methods or kits (such as the Lucigen DNA terminator End Repair Kit) known in the art to generate ends that are optimal for insertion, for example, into blunt sites of cloning vectors. In a particular embodiment, the fragment ends of the population of nucleic acids are blunt ended. More particularly, the fragment ends are blunt ended and phosphorylated. The phosphate moiety can be introduced via enzymatic treatment, for example, using polynucleotide kinase.

[0309] In a particular embodiment, the target fragment sequences are prepared with single overhanging nucleotides by, for example, activity of certain types of DNA polymerase such as Taq polymerase or Klenow exo minus polymerase which has a non-template-dependent terminal transferase activity that adds a single deoxynucleotide, for example, deoxyadenosine (A) to the 3′ ends of a DNA molecule, for example, a PCR product. Such enzymes can be used to add a single nucleotide ‘A’ to the blunt ended 3′ terminus of each strand of the double-stranded target fragments. Thus, an ‘A’ could be added to the 3′ terminus of each end repaired strand of the double-stranded target fragments by reaction with Taq or Klenow exo minus polymerase, while the universal adapter polynucleotide construct could be a T-construct with a compatible ‘T’ overhang present on the 3′ terminus of each region of double-stranded nucleic acid of the universal adapter. This end modification also prevents self-ligation of both vector and target such that there is a bias towards formation of target nucleic acids having a universal adapter at each end.

[0310] In one embodiment, fragmentation can be accomplished using a process often referred to as tagmentation. Tagmentation uses a transposome complex and combines into a single step fragmentation and ligation to add universal adapters (WO 2016/130704). A transposome complex is a transposase bound to a transposase recognition site and can insert the transposase recognition site into a target nucleic acid in a process sometimes termed “tagmentation.” In some such insertion events, one strand of the transposase recognition site may be transferred into the target nucleic acid. Such a strand is referred to as a “transferred strand.” In one embodiment, a transposome complex includes a dimeric transposase having two subunits, and two non-contiguous transposon sequences. In another embodiment, a transposase includes a dimeric transposase having two subunits, and a contiguous transposon sequence.

[0311] Some embodiments can include the use of a hyperactive Tn5 transposase and a Tn5-type transposase recognition site (Goryshin and Reznikoff, J. Biol. Chem., 273:7367 (1998)), or MuA transposase and a Mu transposase recognition site comprising R1 and R² end sequences (Mizuuchi, K., Cell, 35:785, 1983; Savilahti, H, et al., EMBO J., 14:4893, 1995). Tn5 Mosaic End (ME) sequences can also be used by a skilled artisan.

[0312] Examples of transposon sequences useful with the methods and compositions described herein are provided in U.S. Patent Application Pub. No. 2012/0208705, U.S. Patent Application Pub. No. 2012/0208724 and Int. Patent Application Pub. No. WO 2012/061832. In some embodiments, a transposon sequence includes a first transposase recognition site and a second transposase recognition site.

[0313] Some transposome complexes useful herein include a transposase having two transposon sequences. In some such embodiments, the two transposon sequences are not linked to one another, in other words, the transposon sequences are non-contiguous with one another. Examples of such transposomes are known in the art (see, for instance, U.S. Patent Application Pub. No. 2010/0120098).

[0314] In one embodiment, tagmentation is used to produce target nucleic acids that include different universal sequences at each end. This can be accomplished by using two types of transposome complexes, where each transposome complex includes a different nucleotide sequence that is part of the transferred strand.

[0315] A population of target nucleic acids can have an average strand length that is desired or appropriate for a particular application of the methods, compositions, or kits set forth herein. For example, the average strand length can be less than about 100,000 nucleotides, 50,000 nucleotides, 10,000 nucleotides, 5,000 nucleotides, 1,000 nucleotides, 500 nucleotides, 100 nucleotides, or 50 nucleotides. Alternatively or additionally, the average strand length can be greater than about 10 nucleotides, 50 nucleotides, 100 nucleotides, 500 nucleotides, 1,000 nucleotides, 5,000 nucleotides, 10,000 nucleotides, 50,000 nucleotides, or 100,000 nucleotides. The average strand length for a population of target nucleic acids can be in a range between a maximum and minimum value set forth herein. It will be understood that amplicons generated at an amplification site (or otherwise made or used herein) can have an average strand length that is in a range between an upper and lower limit selected from those exemplified above.

[0316] In some cases, a population of target nucleic acids can be produced under conditions or otherwise configured to have a maximum length for its members. For example, the maximum length for the members that are used in one or more steps of a method set forth herein or that are present in a particular composition can be less than 100,000 nucleotides, less than 50,000 nucleotides, less than 10,000 nucleotides, less than 5,000 nucleotides, less than 1,000 nucleotides, less than 500 nucleotides, less than 100 nucleotides, or less than 50 nucleotides. Alternatively or additionally, a population of target nucleic acids can be produced under conditions or otherwise configured to have a minimum length for its members. For example, the minimum length for the members that are used in one or more steps of a method set forth herein or that are present in a particular composition can be more than 10 nucleotides, more than 50 nucleotides, more than 100 nucleotides, more than 500 nucleotides, more than 1,000 nucleotides, more than 5,000 nucleotides, more than 10,000 nucleotides, more than 50,000 nucleotides, or more than 100,000 nucleotides. The maximum and minimum strand length for target nucleic acids in a population can be in a range between a maximum and minimum value set forth above. It will be understood that amplicons generated at an amplification site (or otherwise made or used herein) can have maximum and/or minimum strand lengths in a range between the upper and lower limits exemplified above.

[0317] In some embodiments, a sample can be enriched for sequences of interest, e.g., a predetermined sequence. For example, a subset of genes or regions of the genome are isolated and sequenced, or a subset of genes or regions of the genome are interrogated by other methods, such as a locus-specific in vitro diagnostic method. A predetermined sequence can be, for instance, one that can have a pattern of cytosine modification.

[0318] In some embodiments, target enrichment works by capturing genomic regions of interest by hybridization to target-specific probes that can be used to physically separate target DNA that has hybridized to bait probes from all other DNA in solution, which are then washed away. For example, some methods of enrichment use biotinylated probes, which are then isolated by magnetic pulldown with streptavidin-coated magnetic particles. In another example, some methods of enrichment use analyte arrays, also known as microarrays, that allow for the hybridization of predetermined sequences.

[0319] Enrichment can occur, for example, prior to treatment with a methyltransferase and/or an ACD. In such embodiments, enriching a nucleic acid of interest, or a fragment thereof, such as enriching DNA in a sample, may include any suitable enrichment techniques. In some embodiments, enrichment of DNA may include enrichment through molecular inversion probes, in solution capture, pulldown probes, bait sets, standard PCR, multiplex PCR, hybrid capture, endonuclease digestion, DNase I hypersensitivity, and selective circularization. Enrichment can be achieved through negative selection of nucleic acids by eliminating undesired material. This sort of enrichment includes ‘footprinting’ techniques or ‘subtractive’ hybrid capture. During the former, the target sample is safe from nuclease activity through the protection of protein or by single and double stranded arrangements. During the latter, nucleic acids that bind ‘bait’ probes are eliminated.

[0320] In some embodiments, enriching can comprise amplification using target-specific primers. In some embodiments, amplification is performed subsequent to another form of enrichment. Typically, however, in embodiments where amplification is used for enrichment, the amplification step occurs after treatment with deaminase, to preserve methylation status of the target DNA. In some such embodiments, amplification can include PCR amplification or genome-wide amplification.

[0321] In some embodiments, enrichment can occur after treatment with a methyltransferase and/or an ACD. Typically, methods used to identity methylated cytosines result in the loss of DNA complexity due to conversion of unmethylated DNA bases to uracil, resulting in 3-base genome and limits the use of sequences that specifically hybridize to a predetermined sequence. Accordingly, typical methods for identifying methylated cytosines are more difficult to use in methods that include enrichment, such as hybrid-enrichment sequencing and amplicon-based targeted sequencing, after conversion of methylated cytosines. In contrast, because of (i) the 5mC to T conversion by ACDs and (ii) only a small percentage of cytosines are methylated and expected to be converted by an ACD. Examples of enrichment-based methods that can be used after treatment of a target nucleic acid with an ACD include but are not limited to analyte arrays, use of primers for selective amplification, CRISPR-Cas systems, and molecular cytogenic techniques such as FISH. Examples of arrays include, for instance, methylation arrays for interrogation of selected methylation sites across a genome (e.g., the Infinium MethylationEPIC BeadChip, Illumina).

### Attachment of Universal Adapters

[0322] In some embodiments, a target nucleic acid used in a method, composition, or kit described herein can include a universal adapter attached to each end. A target nucleic acid having a universal adapter at each end can be referred to as a “modified target nucleic acid.” Methods for attaching a universal adapter to each end of a target nucleic acid used in a method described herein are known to the person skilled in the art. The attachment can be through tagmentation using transposase complexes (WO 2016/130704), or through standard library preparation techniques using ligation (U.S. Pat. Pub. No. 2018/0305753). Attachment of a universal adapter to the ends of a target nucleic acid can occur before or after treatment of the target nucleic acid with a methyltransferase and/or an ACD.

[0323] In one embodiment, double-stranded target nucleic acids from a sample, e.g., a fragmented sample that has been contacted with a methyltransferase and an ACD and converted from single-stranded to double-stranded nucleic acids, are treated by first ligating identical universal adaptor molecules to the 5′ and 3′ ends of the double-stranded target nucleic acids. In one embodiment, the universal adapters are “matched” adapters or Y-adapters because the two strands of the adaptors are formed by annealing complementary polynucleotide strands. In one embodiment, the universal adapters used in the method of the disclosure are referred to as “mismatched” adaptors because the adaptors include a region of sequence mismatch, i.e., they are not formed by annealing fully complementary polynucleotide strands. The general features of mismatched adaptors are further described in Gormley et al., U.S. Pat. No. 7,741,463, and Bignell et al., U.S. Pat. No. 8,053,192,). The universal adaptor typically includes universal capture binding sequences that aid in immobilizing the target nucleic acids on an array for subsequent sequencing, and universal primer binding sites useful for the sequencing. In another embodiment, double-stranded target nucleic acids from a sample, a sample that has been contacted with a methyltransferase and an ACD and converted from single-stranded to double-stranded nucleic acids, are subjected to tagmentation with a transposome complex that inserts a universal adapter, or sequences that can be used to add a universal adapter, into a target nucleic acid.

[0324] A universal adapter can optionally include at least one index. An index can be used as a marker characteristic of the source of particular target nucleic acids on a flow cell (U.S. Pat. No. 8,053,192). Generally, the index is a synthetic sequence of nucleotides that is part of the universal adapter which is added to the target nucleic acids as part of the library preparation step. Accordingly, an index is a nucleic acid sequence which is attached to each of the target molecules of a particular sample, the presence of which is indicative of, or is used to identify, the sample or source from which the target molecules were isolated.

[0325] Preferably an index may be up to 20 nucleotides in length, more preferably 1-10 nucleotides, and most preferably 4-6 nucleotides in length. A four nucleotide index gives a possibility of multiplexing 256 samples on the same array, a six base index enables 4096 samples to be processed on the same array.

[0326] The precise nucleotide sequence of the universal adapters is generally not material to the disclosure and may be selected by the user such that the desired sequence elements are ultimately included in the common sequences of the plurality of different modified target nucleic acids, for example, to provide for the universal capture binding sequences for immobilizing the target nucleic acids on an array for subsequent sequencing, and binding sites for particular sets of universal amplification primers and/or sequencing primers. Additional sequence elements may be included, for example, to provide binding sites for sequencing primers which will ultimately be used in sequencing of target nucleic acids in the library, sequencing of an index, or products derived from amplification of the target nucleic acids in the library, for example on a solid support.

[0327] In order to prepare a library of methyltransferase-treated and deaminase-treated DNA for analysis using a sequencing platform, it may be useful to make additional modifications to the target DNA, either prior to or after treatment with a methyltransferase and/or an ACD. In some embodiments, single-stranded methyltransferase-treated, deaminase-treated DNA is prepared for sequencing using a single-stranded library preparation method, as is known in the art. Such methods include, but are not limited to, template switching based second strand synthesis, adapters containing a single-stranded splint overhang, and the like. Reagents for performing single-stranded library preparation methods are commercially available. Examples include xGen ssDNA & Low-Input DNA Library Prep Kit (Integrated DNA Technologies catalog number 10009859), previously sold as Accel-NGS (Swift Biosciences), NGS Single Stranded DNA Library Prep Kit (BioDynami catalog number 30082). Another example includes single-reaction single-stranded library (SRSLY) as set forth in Troll et al., BMC Genomics 20, 1023 (2019).

[0328] In some embodiments, library preparation modifications are made to double-stranded target DNA prior to treatment with a methyltransferase and/or an ACD. Methods for library preparation of double-stranded DNA template are known in the art, and include Y-adaptor ligation, transposome-based tagmentation, and the like. It will be appreciated by those of skill in the art that methods of double-strand library preparation often include one or more amplification steps using for example, PCR. In such methods, the amplification step may be deferred until after methyltransferase and/or ACD treatment, to preserve the methylation status of the template strand. For example, in Y-adapter ligation methods, the Y-adapters can be ligated to the double-stranded template, after which the adapter-ligated template DNA is denatured and treated with a methyltransferase and/or an ACD as described elsewhere herein. Following treatment with a methyltransferase and/or an ACD, the resulting treated single-strand DNA molecules can be amplified using PCR, bridge amplification, and other methods as are commonly known in the art.

### Preparation of Immobilized Samples for Sequencing

[0329] The library of modified target nucleic acids, e.g., target nucleic acids having universal adapters at each end, can be prepared for sequencing. Methods for attaching modified target nucleic acids to a substrate are known in the art. In one embodiment, modified fragments are enriched using a plurality of capture oligonucleotides having specificity for the modified fragments, and the capture oligonucleotides can be immobilized on a surface of a solid substrate such as a flow cell or a bead. For instance, capture oligonucleotides can include a first member of a universal binding pair, and where a second member of the binding pair is immobilized on a surface of a solid substrate. Likewise, methods for amplifying immobilized target nucleic acids include, but are not limited to, bridge amplification and exclusion amplification (also referred to as kinetic exclusion amplification (KEA). Methods for immobilizing and amplifying prior to sequencing are described in, for instance, Bignell et al. (U.S. Pat. No. 8,053,192), Gunderson et al. (WO2016/130704), Shen et al. (U.S. Pat. No. 8,895,249), and Pipenburg et al. (U.S. Pat. No. 9,309,502).

[0330] A pooled sample can be immobilized in preparation for sequencing. Sequencing can be performed as an array of single molecules or can be amplified prior to sequencing. The amplification can be carried out using one or more immobilized primers. The immobilized primer(s) can be, for instance, a lawn on a planar surface, or on a pool of beads. The pool of beads can be isolated into an emulsion with a single bead in each “compartment” of the emulsion. At a concentration of only one template per “compartment,” only a single template is amplified on each bead.

[0331] The term “solid-phase amplification” as used herein refers to any nucleic acid amplification reaction carried out on or in association with a solid support such that all or a portion of the amplified products are immobilized on the solid support as they are formed. In particular, the term encompasses solid-phase polymerase chain reaction (solid-phase PCR) and solid phase isothermal amplification which are reactions analogous to standard solution phase amplification, except that one or both of the forward and reverse amplification primers is/are immobilized on the solid support. Solid phase PCR covers systems such as emulsions, where one primer is anchored to a bead and the other is in free solution, and colony formation in solid phase gel matrices wherein one primer is anchored to the surface, and one is in free solution.

[0332] In some embodiments, the solid support comprises a patterned surface. A “patterned surface” refers to an arrangement of different regions in or on an exposed layer of a solid support. For example, one or more of the regions can be features where one or more amplification primers are present. The features can be separated by interstitial regions where amplification primers are not present. In some embodiments, the pattern can be an x-y format of features that are in rows and columns. In some embodiments, the pattern can be a repeating arrangement of features and/or interstitial regions. In some embodiments, the pattern can be a random arrangement of features and/or interstitial regions. Exemplary patterned surfaces that can be used in the methods and compositions set forth herein are described in U.S. Pat. Nos. 8,778,848, 8,778,849 and 9,079,148, and U.S. Pat. Appl. Pub. No. 2014/0243224.

[0333] In some embodiments, the solid support includes an array of wells or depressions in a surface. This may be fabricated as is generally known in the art using a variety of techniques, including, but not limited to, photolithography, stamping techniques, molding techniques and micro-etching techniques. As will be appreciated by those of skill in the art, the technique used will depend on the composition and shape of the array substrate.

[0334] The features in a patterned surface can be wells in an array of wells (e.g., microwells or nanowells) on glass, silicon, plastic or other suitable solid supports with patterned, covalently-linked gel such as poly(N-(5-azidoacetamidylpentyl) acrylamide-co-acrylamide) (PAZAM, see, for example, US Pub. No. 2013/184796, WO 2016/066586, and WO 2015/002813). The process creates gel pads used for sequencing that can be stable over sequencing runs with a large number of cycles. The covalent linking of the polymer to the wells is helpful for maintaining the gel in the structured features throughout the lifetime of the structured substrate during a variety of uses. However, in many embodiments the gel need not be covalently linked to the wells. For example, in some conditions silane free acrylamide (SFA, see, for example, U.S. Pat. No. 8,563,477) which is not covalently attached to any part of the structured substrate, can be used as the gel material.

[0335] In particular embodiments, a structured substrate can be made by patterning a solid support material with wells (e.g., microwells or nanowells), coating the patterned support with a gel material (e.g., PAZAM, SFA, or chemically modified variants thereof, such as the azidolyzed version of SFA (azido-SFA)) and polishing the gel coated support, for example via chemical or mechanical polishing, thereby retaining gel in the wells but removing or inactivating substantially all of the gel from the interstitial regions on the surface of the structured substrate between the wells. Primer nucleic acids can be attached to gel material. A solution of modified target nucleic acids can then be contacted with the polished substrate such that individual modified target nucleic acids will seed individual wells via interactions with primers attached to the gel material; however, the target nucleic acids will not occupy the interstitial regions due to absence or inactivity of the gel material. Amplification of the modified target nucleic acids will be confined to the wells since absence or inactivity of gel in the interstitial regions prevents outward migration of the growing nucleic acid colony. The process can be conveniently manufactured, being scalable and utilizing conventional micro- or nanofabrication methods.

[0336] Although the disclosure encompasses “solid-phase” amplification methods in which only one amplification primer is immobilized (the other primer usually being present in free solution), in one embodiment the solid support is provided with both the forward and the reverse primers immobilized. In practice, there will be a plurality of identical forward primers and/or a plurality of identical reverse primers immobilized on the solid support, since the amplification process requires an excess of primers to sustain amplification. References herein to forward and reverse primers are to be interpreted accordingly as encompassing a plurality of such primers unless the context indicates otherwise.

[0337] As will be appreciated by the skilled reader, any given amplification reaction requires at least one type of forward primer and at least one type of reverse primer specific for the template to be amplified. However, in certain embodiments the forward and reverse primers may include template-specific portions of identical sequence, and may have entirely identical nucleotide sequence and structure (including any non-nucleotide modifications). In other words, it is possible to carry out solid-phase amplification using only one type of primer, and such single-primer methods are encompassed within the scope of the disclosure. Other embodiments may use forward and reverse primers which contain identical template-specific sequences but which differ in some other structural features. For example, one type of primer may contain a non-nucleotide modification which is not present in the other.

[0338] Primers for solid-phase amplification are preferably immobilized by single point covalent attachment to the solid support at or near the 5′ end of the primer, leaving the template-specific portion of the primer free to anneal to its cognate template and the 3′ hydroxyl group free for primer extension. Any suitable covalent attachment means known in the art may be used for this purpose. The chosen attachment chemistry will depend on the nature of the solid support, and any derivatization or functionalization applied to it. The primer itself may include a moiety, which may be a non-nucleotide chemical modification, to facilitate attachment. In a particular embodiment, the primer may include a sulphur-containing nucleophile, such as phosphorothioate or thiophosphate, at the 5′ end. In the case of solid-supported polyacrylamide hydrogels, this nucleophile will bind to a bromoacetamide group present in the hydrogel. A more particular means of attaching primers and templates to a solid support is via 5′ phosphorothioate attachment to a hydrogel comprised of polymerized acrylamide and N-(5-bromoacetamidylpentyl) acrylamide (BRAPA), as described in Int. Pub. No. WO 05/065814.

[0339] Certain embodiments of the disclosure may make use of solid supports that include an inert substrate or matrix (e.g., glass slides, polymer beads, etc.) which has been “functionalized,” for example by application of a layer or coating of an intermediate material including reactive groups which permit covalent attachment to biomolecules, such as polynucleotides. Examples of such supports include, but are not limited to, polyacrylamide hydrogels supported on an inert substrate such as glass. In such embodiments, the biomolecules (e.g., polynucleotides) may be directly covalently attached to the intermediate material (e.g., the hydrogel), but the intermediate material may itself be non-covalently attached to the substrate or matrix (e.g., the glass substrate). The term “covalent attachment to a solid support” is to be interpreted accordingly as encompassing this type of arrangement.

[0340] The pooled samples may be amplified on beads wherein each bead contains a forward and reverse amplification primer. In one embodiment, a library of modified target nucleic acids is used to prepare clustered arrays of nucleic acid colonies, analogous to those described in U.S. Pub. No. 2005/0100900, U.S. Pat. No. 7,115,400, WO 00/18957 and WO 98/44151 by solid-phase amplification and more particularly solid phase isothermal amplification. The terms “cluster” and “colony” are used interchangeably herein to refer to a discrete site on a solid support including a plurality of identical immobilized nucleic acid strands and a plurality of identical immobilized complementary nucleic acid strands. The term “clustered array” refers to an array formed from such clusters or colonies. In this context, the term “array” is not to be understood as requiring an ordered arrangement of clusters.

[0341] The term “solid phase” or “surface” is used to mean either a planar array wherein primers are attached to a flat surface, for example, glass, silica or plastic microscope slides or similar flow cell devices; beads, wherein either one or two primers are attached to the beads and the beads are amplified; or an array of beads on a surface after the beads have been amplified.

[0342] Clustered arrays can be prepared using either a process of thermocycling, as described in WO 98/44151, or a process whereby the temperature is maintained as a constant, and the cycles of extension and denaturing are performed using changes of reagents. Such isothermal amplification methods are described in patent application numbers WO 02/46456 and U.S. Pub. No. 2008/0009420.

[0343] It will be appreciated that any of the amplification methodologies described herein or generally known in the art may be used with universal or target-specific primers to amplify immobilized DNA fragments. Suitable methods for amplification include, but are not limited to, the polymerase chain reaction (PCR), strand displacement amplification (SDA), transcription mediated amplification (TMA) and nucleic acid sequence-based amplification (NASBA), as described in U.S. Pat. No. 8,003,354. The above amplification methods may be employed to amplify one or more nucleic acids of interest. For example, PCR, including multiplex PCR, SDA, TMA, NASBA and the like may be utilized to amplify immobilized DNA fragments. In some embodiments, primers directed specifically to the polynucleotide of interest are included in the amplification reaction.

[0344] Other suitable methods for amplification of polynucleotides may include oligonucleotide extension and ligation, rolling circle amplification (RCA) (Lizardi et al., Nat. Genet. 19:225-232 (1998)) and oligonucleotide ligation assay (OLA) (See generally U.S. Pat. Nos. 7,582,420, 5,185,243, 5,679,524 and 5,573,907; EP 0 320 308 B1; EP 0 336 731 B1; EP 0 439 182 B1; WO 90/01069; WO 89/12696; and WO 89/09835) technologies. It will be appreciated that these amplification methodologies may be designed to amplify immobilized DNA fragments. For example, in some embodiments, the amplification method may include ligation probe amplification or oligonucleotide ligation assay (OLA) reactions that contain primers directed specifically to the nucleic acid of interest. In some embodiments, the amplification method may include a primer extension-ligation reaction that contains primers directed specifically to the nucleic acid of interest. As a non-limiting example of primer extension and ligation primers that may be specifically designed to amplify a nucleic acid of interest, the amplification may include primers used for the GoldenGate assay (Illumina, Inc., San Diego, CA) as exemplified by U.S. Pat. Nos. 7,582,420 and 7,611,869.

[0345] DNA nanoballs can also be used in combination with methods, systems, compositions and kits as described herein. Methods for creating and using DNA nanoballs for genomic sequencing can be found at, for example, US patents and publications U.S. Pat. No. 7,910,354, 2009/0264299, 2009/0011943, 2009/0005252, 2009/0155781, 2009/0118488 and as described in, for example, Drmanac et al. (2010, Science 327 (5961): 78-81). Briefly, following production of modified target nucleic acids, the modified target nucleic acids are circularized and amplified by rolling circle amplification (Lizardi et al., 1998. Nat. Genet. 19:225-232; US 2007/0099208 A1). The extended concatemeric structure of the amplicons promotes coiling creates compact DNA nanoballs. The DNA nanoballs can be captured on substrates, preferably to create an ordered or patterned array such that distance between each nanoball is maintained thereby allowing sequencing of the separate DNA nanoballs. In some embodiments such as those used by Complete Genomics (Mountain View, Calif.), consecutive rounds of adapter addition, amplification, and digestion are carried out prior to circularization to produce head to tail constructs having several target nucleic acids separated by adapter sequences.

[0346] Exemplary isothermal amplification methods that may be used in a method of the present disclosure include, but are not limited to, Multiple Displacement Amplification (MDA) as exemplified by, for example Dean et al., Proc. Natl. Acad. Sci. USA 99:5261-66 (2002) or isothermal strand displacement nucleic acid amplification exemplified by, for example U.S. Pat. No. 6,214,587. Other non-PCR-based methods that may be used in the present disclosure include, for example, strand displacement amplification (SDA) which is described in, for example Walker et al., Molecular Methods for Virus Detection, Academic Press, Inc., 1995; U.S. Pat. Nos. 5,455,166, and 5,130,238, and Walker et al., Nucl. Acids Res. 20:1691-96 (1992) or hyper-branched strand displacement amplification which is described in, for example Lage et al., Genome Res. 13:294-307 (2003). Isothermal amplification methods may be used with, for instance, the strand-displacing Phi 29 polymerase or Bst DNA polymerase large fragment, 5′->3′ exo-for random primer amplification of genomic DNA. The use of these polymerases takes advantage of their high processivity and strand displacing activity. High processivity allows the polymerases to produce fragments that are 10-20 kb in length. As set forth above, smaller fragments may be produced under isothermal conditions using polymerases having low processivity and strand-displacing activity such as Klenow polymerase. Additional description of amplification reactions, conditions and components are set forth in detail in the disclosure of U.S. Pat. No. 7,670,810.

[0347] In some embodiments, isothermal amplification can be performed using kinetic exclusion amplification (KEA), also referred to as exclusion amplification (ExAmp). A nucleic acid library of the present disclosure can be made using a method that includes a step of reacting an amplification reagent to produce a plurality of amplification sites that each includes a substantially clonal population of amplicons from an individual target nucleic acid that has seeded the site. In some embodiments, the amplification reaction proceeds until a sufficient number of amplicons are generated to fill the capacity of the respective amplification site. Filling an already seeded site to capacity in this way inhibits target nucleic acids from landing and amplifying at the site thereby producing a clonal population of amplicons at the site. In some embodiments, apparent clonality can be achieved even if an amplification site is not filled to capacity prior to a second target nucleic acid arriving at the site. Under some conditions, amplification of a first target nucleic acid can proceed to a point that a sufficient number of copies are made to effectively outcompete or overwhelm production of copies from a second target nucleic acid that is transported to the site. For example, in an embodiment that uses a bridge amplification process on a circular feature that is smaller than 500 nm in diameter, it has been determined that after 14 cycles of exponential amplification for a first target nucleic acid, contamination from a second target nucleic acid at the same site will produce an insufficient number of contaminating amplicons to adversely impact sequencing-by-synthesis analysis on an Illumina sequencing platform.

[0348] In some embodiments, amplification sites in an array can be, but need not be, entirely clonal. Rather, for some applications, an individual amplification site can be predominantly populated with amplicons from a first modified target nucleic acid and can also have a low level of contaminating amplicons from a second modified target nucleic acid. An array can have one or more amplification sites that have a low level of contaminating amplicons so long as the level of contamination does not have an unacceptable impact on a subsequent use of the array. For example, when the array is to be used in a detection application, an acceptable level of contamination would be a level that does not impact signal to noise or resolution of the detection technique in an unacceptable way. Accordingly, apparent clonality will generally be relevant to a particular use or application of an array made by the methods set forth herein. Exemplary levels of contamination that can be acceptable at an individual amplification site for particular applications include, but are not limited to, at most 0.1%, 0.5%, 1%, 5%, 10% or 25% contaminating amplicons. An array can include one or more amplification sites having these exemplary levels of contaminating amplicons. For example, up to 5%, 10%, 25%, 50%, 75%, or even 100% of the amplification sites in an array can have some contaminating amplicons. It will be understood that in an array or other collection of sites, at least 50%, 75%, 80%, 85%, 90%, 95% or 99% or more of the sites can be clonal or apparently clonal.

[0349] In some embodiments, kinetic exclusion can occur when a process occurs at a sufficiently rapid rate to effectively exclude another event or process from occurring. Take for example the making of a nucleic acid array where sites of the array are randomly seeded with modified target nucleic acids from a solution and copies of the modified target nucleic acids are generated in an amplification process to fill each of the seeded sites to capacity. In accordance with the kinetic exclusion methods of the present disclosure, the seeding and amplification processes can proceed simultaneously under conditions where the amplification rate exceeds the seeding rate. As such, the relatively rapid rate at which copies are made at a site that has been seeded by a first target nucleic acid will effectively exclude a second nucleic acid from seeding the site for amplification. Kinetic exclusion amplification methods can be performed as described in detail in the disclosure of U.S. Pat. Appl. Pub. No. 2013/0338042.

[0350] Kinetic exclusion can exploit a relatively slow rate for initiating amplification (e.g., a slow rate of making a first copy of a modified target nucleic acids) vs. a relatively rapid rate for making subsequent copies of the modified target nucleic acids (or of the first copy of the modified target nucleic acids). In the example of the previous paragraph, kinetic exclusion occurs due to the relatively slow rate of modified target nucleic acids seeding (e.g., relatively slow diffusion or transport) vs. the relatively rapid rate at which amplification occurs to fill the site with copies of the modified target nucleic acid seed. In another exemplary embodiment, kinetic exclusion can occur due to a delay in the formation of a first copy of a modified target nucleic acid that has seeded a site (e.g., delayed or slow activation) vs. the relatively rapid rate at which subsequent copies are made to fill the site. In this example, an individual site may have been seeded with several different modified target nucleic acids (e.g., several modified target nucleic acids can be present at each site prior to amplification). However, first copy formation for any given modified target nucleic acid can be activated randomly such that the average rate of first copy formation is relatively slow compared to the rate at which subsequent copies are generated. In this case, although an individual site may have been seeded with several different modified target nucleic acids, kinetic exclusion will allow only one of those to be amplified. More specifically, once a first modified target nucleic acid has been activated for amplification, the site will rapidly fill to capacity with its copies, thereby preventing copies of a second modified target nucleic acid from being made at the site.

[0351] In one embodiment, the method is carried out to simultaneously (i) transport modified target nucleic acids to amplification sites at an average transport rate, and (ii) amplify the modified target nucleic acids that are at the amplification sites at an average amplification rate, wherein the average amplification rate exceeds the average transport rate (U.S. Pat. No. 9,169,513). Accordingly, kinetic exclusion can be achieved in such embodiments by using a relatively slow rate of transport. For example, a sufficiently low concentration of modified target nucleic acids can be selected to achieve a desired average transport rate, lower concentrations resulting in slower average rates of transport. Alternatively or additionally, a high viscosity solution and/or presence of molecular crowding reagents in the solution can be used to reduce transport rates. Examples of useful molecular crowding reagents include, but are not limited to, polyethylene glycol (PEG), ficoll, dextran, or polyvinyl alcohol. Exemplary molecular crowding reagents and formulations are set forth in U.S. Pat. No. 7,399,590. Another factor that can be adjusted to achieve a desired transport rate is the average size of the target nucleic acids.

[0352] An amplification reagent can include further components that facilitate amplicon formation, and in some cases increase the rate of amplicon formation. An example is a recombinase. Recombinase can facilitate amplicon formation by allowing repeated invasion/extension. More specifically, recombinase can facilitate invasion of a modified target nucleic acid by the polymerase and extension of a primer by the polymerase using the modified target nucleic acid as a template for amplicon formation. This process can be repeated as a chain reaction where amplicons produced from each round of invasion/extension serve as templates in a subsequent round. The process can occur more rapidly than standard PCR since a denaturation cycle (e.g., via heating or chemical denaturation) is not required. As such, recombinase-facilitated amplification can be carried out isothermally. It is generally desirable to include ATP, or other nucleotides (or in some cases non-hydrolyzable analogs thereof) in a recombinase-facilitated amplification reagent to facilitate amplification. A mixture of recombinase and single-stranded binding (SSB) protein is particularly useful as SSB can further facilitate amplification. Exemplary formulations for recombinase-facilitated amplification include those sold commercially as TwistAmp kits by TwistDx (Cambridge, UK). Useful components of recombinase-facilitated amplification reagent and reaction conditions are set forth in U.S. Pat. Nos. 5,223,414 and 7,399,590.

[0353] Another example of a component that can be included in an amplification reagent to facilitate amplicon formation and in some cases to increase the rate of amplicon formation is a helicase. Helicase can facilitate amplicon formation by allowing a chain reaction of amplicon formation. The process can occur more rapidly than standard PCR since a denaturation cycle (e.g., via heating or chemical denaturation) is not required. As such, helicase-facilitated amplification can be carried out isothermally. A mixture of helicase and single-stranded binding (SSB) protein is particularly useful as SSB can further facilitate amplification. Exemplary formulations for helicase-facilitated amplification include those sold commercially as IsoAmp kits from Biohelix (Beverly, MA). Further, examples of useful formulations that include a helicase protein are described in U.S. Pat. Nos. 7,399,590 and 7,829,284.

[0354] Yet another example of a component that can be included in an amplification reagent to facilitate amplicon formation and in some cases increase the rate of amplicon formation is an origin binding protein.

### Methods of Sequencing

[0355] Following attachment of modified target nucleic acids to a surface, the sequence of the immobilized and amplified modified target nucleic acids is determined. Sequencing can be carried out using any suitable sequencing technique, and methods for determining the sequence of immobilized and amplified modified target nucleic acids, including strand re-synthesis, are known in the art and are described in, for instance, Bignell et al. (U.S. Pat. No. 8,053,192), Gunderson et al. (WO2016/130704), Shen et al. (U.S. Pat. No. 8,895,249), and Pipenburg et al. (U.S. Pat. No. 9,309,502).

[0356] The methods described herein can be used in conjunction with a variety of nucleic acid sequencing techniques. Particularly applicable techniques are those wherein nucleic acids are attached at fixed locations in an array such that their relative positions do not change and wherein the array is repeatedly imaged. Embodiments in which images are obtained in different color channels, for example, coinciding with different labels used to distinguish one nucleotide base type from another are particularly applicable. In some embodiments, the process to determine the nucleotide sequence of a modified target nucleic acid can be an automated process. Preferred embodiments include sequencing-by-synthesis (“SBS”) techniques.

[0357] SBS techniques generally involve the enzymatic extension of a nascent nucleic acid strand through the iterative addition of nucleotides against a template strand. In traditional methods of SBS, a single nucleotide monomer may be provided to a target nucleotide in the presence of a polymerase in each delivery. However, in the methods described herein, more than one type of nucleotide monomer can be provided to a target nucleic acid in the presence of a polymerase in a delivery.

[0358] In one embodiment, a nucleotide monomer includes locked nucleic acids (LNAs) or bridged nucleic acids (BNAs). The use of LNAs or BNAs in a nucleotide monomer increases hybridization strength between a nucleotide monomer and a sequencing primer sequence present on an immobilized modified target nucleic acid.

[0359] SBS can use nucleotide monomers that have a terminator moiety or those that lack any terminator moieties. Methods using nucleotide monomers lacking terminators include, for example, pyrosequencing and sequencing using y-phosphate-labeled nucleotides, as set forth in further detail herein. In methods using nucleotide monomers lacking terminators, the number of nucleotides added in each cycle is generally variable and dependent upon the template sequence and the mode of nucleotide delivery. For SBS techniques that use nucleotide monomers having a terminator moiety, the terminator can be effectively irreversible under the sequencing conditions used as is the case for traditional Sanger sequencing which utilizes dideoxynucleotides, or the terminator can be reversible as is the case for sequencing methods developed by Solexa (now Illumina, Inc.).

[0360] SBS techniques can use nucleotide monomers that have a label moiety or those that lack a label moiety. Accordingly, incorporation events can be detected based on a characteristic of the label, such as fluorescence of the label; a characteristic of the nucleotide monomer such as molecular weight or charge; a byproduct of incorporation of the nucleotide, such as release of pyrophosphate; or the like. In embodiments where two or more different nucleotides are present in a sequencing reagent, the different nucleotides can be distinguishable from each other, or alternatively the two or more different labels can be the indistinguishable under the detection techniques being used. For example, the different nucleotides present in a sequencing reagent can have different labels and they can be distinguished using appropriate optics as exemplified by the sequencing methods developed by Solexa (now Illumina, Inc.).

[0361] Preferred embodiments include pyrosequencing techniques. Pyrosequencing detects the release of inorganic pyrophosphate (PPi) as particular nucleotides are incorporated into the nascent strand (Ronaghi, M., Karamohamed, S., Pettersson, B., Uhlen, M. and Nyren, P. (1996) “Real-time DNA sequencing using detection of pyrophosphate release.” Analytical Biochemistry 242 (1), 84-9; Ronaghi, M. (2001) “Pyrosequencing sheds light on DNA sequencing.” Genome Res. 11 (1), 3-11; Ronaghi, M., Uhlen, M. and Nyren, P. (1998) “A sequencing method based on real-time pyrophosphate.” Science 281 (5375), 363; U.S. Pat. Nos. 6,210,891; 6,258,568 and 6,274,320). In pyrosequencing, released PPi can be detected by being immediately converted to adenosine triphosphate (ATP) by ATP sulfurase, and the level of ATP generated is detected via luciferase-produced photons. The nucleic acids to be sequenced can be attached to features in an array and the array can be imaged to capture the chemiluminescent signals that are produced due to incorporation of a nucleotides at the features of the array. An image can be obtained after the array is treated with a particular nucleotide type (e.g., A, T, C or G). Images obtained after addition of each nucleotide type will differ with regard to which features in the array are detected. These differences in the image reflect the different sequence content of the features on the array. However, the relative locations of each feature will remain unchanged in the images. The images can be stored, processed and analyzed using the methods set forth herein. For example, images obtained after treatment of the array with each different nucleotide type can be handled in the same way as exemplified herein for images obtained from different detection channels for reversible terminator-based sequencing methods.

[0362] In another exemplary type of SBS, cycle sequencing is accomplished by stepwise addition of reversible terminator nucleotides containing, for example, a cleavable or photobleachable dye label as described, for example, in WO 04/018497 and U.S. Pat. No. 7,057,026. This approach is being commercialized by Solexa (now Illumina Inc.), and is also described in WO 91/06678 and WO 07/123,744. The availability of fluorescently-labeled terminators in which both the termination can be reversed and the fluorescent label cleaved facilitates efficient cyclic reversible termination (CRT) sequencing. Polymerases can also be co-engineered to efficiently incorporate and extend from these modified nucleotides.

[0363] In some reversible terminator-based sequencing embodiments, the labels do not substantially inhibit extension under SBS reaction conditions. However, the detection labels can be removable, for example, by cleavage or degradation. Images can be captured following incorporation of labels into arrayed nucleic acid features. In particular embodiments, each cycle involves simultaneous delivery of four different nucleotide types to the array and each nucleotide type has a spectrally distinct label. Four images can then be obtained, each using a detection channel that is selective for one of the four different labels. Alternatively, different nucleotide types can be added sequentially and an image of the array can be obtained between each addition step. In such embodiments, each image will show nucleic acid features that have incorporated nucleotides of a particular type. Different features will be present or absent in the different images due the different sequence content of each feature. However, the relative position of the features will remain unchanged in the images. Images obtained from such reversible terminator-SBS methods can be stored, processed and analyzed as set forth herein. Following the image capture step, labels can be removed and reversible terminator moieties can be removed for subsequent cycles of nucleotide addition and detection. Removal of the labels after they have been detected in a particular cycle and prior to a subsequent cycle can provide the advantage of reducing background signal and crosstalk between cycles. Examples of useful labels and removal methods are set forth herein.

[0364] In particular embodiments some or all of the nucleotide monomers can include reversible terminators. In such embodiments, reversible terminators/cleavable fluorophores can include fluorophores linked to the ribose moiety via a 3′ ester linkage (Metzker, Genome Res. 15:1767-1776 (2005)). Other approaches have separated the terminator chemistry from the cleavage of the fluorescence label (Ruparel et al., Proc Natl Acad Sci USA 102:5932-7 (2005)). Ruparel et al. described the development of reversible terminators that used a small 3′ allyl group to block extension, but could easily be deblocked by a short treatment with a palladium catalyst. The fluorophore was attached to the base via a photocleavable linker that could easily be cleaved by a 30 second exposure to long wavelength UV light. Thus, either disulfide reduction or photocleavage can be used as a cleavable linker. Another approach to reversible termination is the use of natural termination that ensues after placement of a bulky dye on a dNTP. The presence of a charged bulky dye on the dNTP can act as an effective terminator through steric and/or electrostatic hindrance. The presence of one incorporation event prevents further incorporations unless the dye is removed. Cleavage of the dye removes the fluorophore and effectively reverses the termination. Examples of modified nucleotides are also described in U.S. Pat. Nos. 7,427,673, and 7,057,026.

[0365] Additional exemplary SBS systems and methods which can be used with the methods and systems described herein are described in U.S. Pub. Nos. 2007/0166705, 2006/0188901, 2006/0240439, 2006/0281109, 2012/0270305, and 2013/0260372, U.S. Pat. No. 7,057,026, PCT Publication No. WO 05/065814, U.S. Patent Application Publication No. 2005/0100900, and PCT Publication Nos. WO 06/064199 and WO 07/010,251.

[0366] Some embodiments can use detection of four different nucleotides using fewer than four different labels. For example, SBS can be performed using methods and systems described in the incorporated materials of U.S. Pub. No. 2013/0079232. As a first example, a pair of nucleotide types can be detected at the same wavelength, but distinguished based on a difference in intensity for one member of the pair compared to the other, or based on a change to one member of the pair (e.g., via chemical modification, photochemical modification or physical modification) that causes apparent signal to appear or disappear compared to the signal detected for the other member of the pair. As a second example, three of four different nucleotide types can be detected under particular conditions while a fourth nucleotide type lacks a label that is detectable under those conditions, or is minimally detected under those conditions (e.g., minimal detection due to background fluorescence, etc.). Incorporation of the first three nucleotide types into a nucleic acid can be determined based on presence of their respective signals and incorporation of the fourth nucleotide type into the nucleic acid can be determined based on absence or minimal detection of any signal. As a third example, one nucleotide type can include label(s) that are detected in two different channels, whereas other nucleotide types are detected In no more than one of the channels. The aforementioned three exemplary configurations are not considered mutually exclusive and can be used in various combinations. An exemplary embodiment that combines all three examples, is a fluorescent-based SBS method that uses a first nucleotide type that is detected in a first channel (e.g., dATP having a label that is detected in the first channel when excited by a first excitation wavelength), a second nucleotide type that is detected in a second channel (e.g., dCTP having a label that is detected in the second channel when excited by a second excitation wavelength), a third nucleotide type that is detected in both the first and the second channel (e.g., dTTP having at least one label that is detected in both channels when excited by the first and/or second excitation wavelength) and a fourth nucleotide type that lacks a label that is not, or minimally, detected in either channel (e.g., dGTP having no label).

[0367] Further, as described in U.S. Pub. No. 2013/0079232, sequencing data can be obtained using a single channel. In such so-called one-dye sequencing approaches, the first nucleotide type is labeled but the label is removed after the first image is generated, and the second nucleotide type is labeled only after a first image is generated. The third nucleotide type retains its label in both the first and second images, and the fourth nucleotide type remains unlabeled in both images.

[0368] Some embodiments can use sequencing by ligation techniques. Such techniques use DNA ligase to incorporate oligonucleotides and identify the incorporation of such oligonucleotides. The oligonucleotides typically have different labels that are correlated with the identity of a particular nucleotide in a sequence to which the oligonucleotides hybridize. As with other SBS methods, images can be obtained following treatment of an array of nucleic acid features with the labeled sequencing reagents. Each image will show nucleic acid features that have incorporated labels of a particular type. Different features will be present or absent in the different images due the different sequence content of each feature, but the relative position of the features will remain unchanged in the images. Images obtained from ligation-based sequencing methods can be stored, processed and analyzed as set forth herein. Exemplary SBS systems and methods which can be utilized with the methods and systems described herein are described in U.S. Pat. Nos. 6,969,488, 6,172,218, and 6,306,597.

[0369] Some embodiments can use nanopore sequencing (Deamer, D. W. & Akeson, M. “Nanopores and nucleic acids: prospects for ultrarapid sequencing.” Trends Biotechnol. 18, 147-151 (2000); Deamer, D. and D. Branton, “Characterization of nucleic acids by nanopore analysis”, Acc. Chem. Res. 35:817-825 (2002); Li, J., M. Gershow, D. Stein, E. Brandin, and J. A. Golovchenko, “DNA molecules and configurations in a solid-state nanopore microscope” Nat. Mater. 2:611-615 (2003)). In such embodiments, the modified target nucleic acid passes through a nanopore. The nanopore can be a synthetic pore or biological membrane protein, such as a-hemolysin. As the modified target nucleic acid passes through the nanopore, each base-pair can be identified by measuring fluctuations in the electrical conductance of the pore. (U.S. Pat. No. 7,001,792; Soni, G. V. & Meller, “A. Progress toward ultrafast DNA sequencing using solid-state nanopores.” Clin. Chem. 53, 1996-2001 (2007); Healy, K. “Nanopore-based single-molecule DNA analysis.” Nanomed. 2, 459-481 (2007); Cockroft, S. L., Chu, J., Amorin, M. & Ghadiri, M. R. “A single-molecule nanopore device detects DNA polymerase activity with single-nucleotide resolution.” J. Am. Chem. Soc. 130, 818-820 (2008)). Data obtained from nanopore sequencing can be stored, processed and analyzed as set forth herein. In particular, the data can be treated as an image in accordance with the exemplary treatment of optical images and other images that is set forth herein.

[0370] Some embodiments can use methods involving the real-time monitoring of DNA polymerase activity. Nucleotide incorporations can be detected through fluorescence resonance energy transfer (FRET) interactions between a fluorophore-bearing polymerase and γ-phosphate-labeled nucleotides as described, for example, in U.S. Pat. Nos. 7,329,492 and 7,211,414, or nucleotide incorporations can be detected with zero-mode waveguides as described, for example, in U.S. Pat. No. 7,315,019, and using fluorescent nucleotide analogs and engineered polymerases as described, for example, in U.S. Pat. No. 7,405,281 and U.S. Pub. No. 2008/0108082. The illumination can be restricted to a zeptoliter-scale volume around a surface-tethered polymerase such that incorporation of fluorescently labeled nucleotides can be observed with low background (Levene, M. J. et al. “Zero-mode waveguides for single-molecule analysis at high concentrations.” Science 299, 682-686 (2003); Lundquist, P. M. et al. “Parallel confocal detection of single molecules in real time.” Opt. Lett. 33, 1026-1028 (2008); Korlach, J. et al. “Selective aluminum passivation for targeted immobilization of single DNA polymerase molecules in zero-mode waveguide nano structures.” Proc. Natl. Acad. Sci. USA 105, 1176-1181 (2008)). Images obtained from such methods can be stored, processed and analyzed as set forth herein.

[0371] Some SBS embodiments include detection of a proton released upon incorporation of a nucleotide into an extension product. For example, sequencing based on detection of released protons can use an electrical detector and associated techniques that are commercially available from Ion Torrent (Guilford, CT, a Life Technologies subsidiary) or sequencing methods and systems described in U.S. Pub. Nos. 2009/0026082; 2009/0127589; 2010/0137143; and 2010/0282617. Methods set forth herein for amplifying target nucleic acids using kinetic exclusion can be readily applied to substrates used for detecting protons. More specifically, methods set forth herein can be used to produce clonal populations of amplicons that are used to detect protons.

[0372] The above SBS methods can be advantageously carried out in multiplex formats such that multiple different modified target nucleic acids are manipulated simultaneously. In particular embodiments, different modified target nucleic acids can be treated in a common reaction vessel or on a surface of a particular substrate. This allows convenient delivery of sequencing reagents, removal of unreacted reagents and detection of incorporation events in a multiplex manner. In embodiments using surface-bound target nucleic acids, the modified target nucleic acids can be in an array format. In an array format, the modified target nucleic acids can be typically bound to a surface in a spatially distinguishable manner. The modified target nucleic acids can be bound by direct covalent attachment, attachment to a bead or other particle or binding to a polymerase or other molecule that is attached to the surface. The array can include a single copy of a modified target nucleic acid at each site (also referred to as a feature) or multiple copies having the same sequence can be present at each site or feature. Multiple copies can be produced by amplification methods such as, bridge amplification or emulsion PCR as described in further detail herein.

[0373] The methods set forth herein can use arrays having features at any of a variety of densities including, for example, at least about 10 features/cm₂, 100 features/cm², 500 features/cm², 1,000 features/cm², 5,000 features/cm², 10,000 features/cm², 50,000 features/cm², 100,000 features/cm², 1,000,000 features/cm², 5,000,000 features/cm², or higher.

[0374] An advantage of the methods set forth herein is that they provide for rapid and efficient detection of a plurality of cm², in parallel. Accordingly, the present disclosure provides integrated systems capable of preparing and detecting nucleic acids using techniques known in the art such as those exemplified herein. Thus, an integrated system of the present disclosure can include fluidic components capable of delivering amplification reagents and/or sequencing reagents to one or more immobilized modified target nucleic acids, the system including components such as pumps, valves, reservoirs, fluidic lines and the like. A flow cell can be configured and/or used in an integrated system for detection of target nucleic acids. Exemplary flow cells are described, for example, in U.S. Pat. Nos. 8,241,573 and 8,951,781. As exemplified for flow cells, one or more of the fluidic components of an integrated system can be used for an amplification method and for a detection method. Taking a nucleic acid sequencing embodiment as an example, one or more of the fluidic components of an integrated system can be used for an amplification method set forth herein and for the delivery of sequencing reagents in a sequencing method such as those exemplified above. Alternatively, an integrated system can include separate fluidic systems to carry out amplification methods and to carry out detection methods. Examples of integrated sequencing systems that are capable of creating amplified nucleic acids and also determining the sequence of the nucleic acids include, without limitation, the MiSeq™ platform (Illumina, Inc., San Diego, CA) and devices described in U.S. Pat. No. 8,951,781.

[0375] While the embodiments presented herein are generally described using a sequencing platform (such as a sequencing by synthesis platform) as a readout, one of ordinary skill in the art will recognize that nucleic acids modified by the methyltransferases and ACDs presented herein can also be detected using any other suitable readout methodology. For example, the location and identity of modified cytosines can be assessed using a microarray. Any of a variety of analyte arrays (also referred to as “microarrays”) known in the art can be used in a method or system set forth herein. A typical array contains analytes, each having an individual probe or a population of probes. In the latter case, the population of probes at each analyte is typically homogenous having a single species of probe. For example, in the case of a nucleic acid array, each analyte can have multiple nucleic acid molecules each having a common sequence. However, in some implementations the populations at each analyte of an array can be heterogeneous. Similarly, protein arrays can have analytes with a single protein or a population of proteins typically, but not always, having the same amino acid sequence. The probes can be attached to the surface of an array for example, via covalent linkage of the probes to the surface or via non-covalent interaction(s) of the probes with the surface. In some implementations, probes, such as nucleic acid molecules, can be attached to a surface via a gel layer as described, for example, in U.S. patent application Ser. No. 13/784,368 and US Pat. App. Pub. No. 2011/0059865 A1.

[0376] Example arrays include, without limitation, a BeadChip Array available from Illumina, Inc. (San Diego, Calif.) or others such as those where probes are attached to beads that are present on a surface (e.g., beads in wells on a surface) such as those described in U.S. Pat. Nos. 6,266,459; 6,355,431; 6,770,441; 6,859,570; or 7,622,294; or PCT Publication No. WO 00/63437. Further examples of commercially available microarrays that can be used include, for example, an Affymetrix® GeneChip® microarray or other microarray synthesized in accordance with techniques sometimes referred to as VLSIPS™ (Very Large Scale Immobilized Polymer Synthesis) technologies. A spotted microarray can also be used in a method or system according to some implementations of the present disclosure. An example spotted microarray is a CodeLink™ Array available from Amersham Biosciences. Another microarray that is useful is one that is manufactured using inkjet printing methods such as SurePrint™ Technology available from Agilent Technologies.

[0377] In a specific embodiment, a methyltransferase of the present disclosure and an ACD as presented herein can be used to convert 5-methyl cytosine (5mC) to thymidine (T) by deamination as described herein, such as by providing a sample of DNA suspected of including single-stranded DNA including at least one 5-methyl cytosine (5mC), at least one 5-hydroxymethyl cytosine (5hmC), at least one 5-formyl cytosine (5fC), at least one 5-carboxy cytosine (5CaC), or a combination thereof; contacting the DNA with the methyltransferase under conditions suitable for protection of any unmodified C; contacting the DNA with the ACD under conditions suitable for conversion of 5-methylcytosine (5mC) to thymidine (T) by deamination at a greater rate than conversion of cytosine (C) to uracil (U) by deamination, to result in converted single-stranded DNA, wherein 5mC, 5hmC, 5fC, and/or 5CaC are converted to T.

[0378] In a specific embodiment, a methyltransferase of the present disclosure and an ACD of the present disclosure can be used to detect 5hmC as described herein, such as by providing a sample of DNA suspected of including single-stranded DNA that has at least one 5-hydroxymethyl cytosine (5hmC); contacting the DNA with the methyltransferase under conditions suitable for protection of any unmodified C; contacting the DNA with the ACD under conditions suitable for conversion of unmodified cytosine to uracil and 5mC to thymidine and no detectable conversion of 5hmC to 5hmU.

[0379] The converted single-stranded DNA can then be processed as needed to facilitate hybridization to a microarray. For example, the converted DNA can be amplified. Any one of a number of amplification methods as are known in the art can be performed. For example, whole-genome amplification or amplification using universal primers that hybridize to a common region in the converted DNA, such as an adaptor sequence, can be used. Additionally or alternatively, the converted DNA can be fragmented. Fragmentation can be performed prior to or following amplification, or in the absence of amplification. Any one of a number of fragmentation methods as are known in the art can be performed. As one example, fragmentation can be performed using an enzymatic process, such as a restriction endonuclease or other enzyme capable of cleaving the converted DNA. As another example, fragmentation can be performed using mechanical means, such as shearing using, for example a sonication device such as those supplied by Covaris. The fragmented converted DNA can then be precipitated and/or resuspended in a buffer suitable for hybridization to a microarray. Following hybridization, the methylation state of regions of interest, such as a specific CpG locus or loci, can be interrogated at specific locations on the microarray. Methods of preparing converted DNA for microarray analysis are known in the art. One example of such methods is described in the Methylation Protocol Guide for the Infinium HD Assay from Illumina (San Diego, CA). Whereas such a protocol guide may describe use of a microarray designed for interrogation of bisulfite-converted DNA, it will be understood that array features, specifically probe sequences, can be specifically designed for DNA that has not been bisulfite converted. As an example, a commercially available microarray such as the Infinium MethylationEPIC BeadChip (Illumina) is specifically designed to hybridize with DNA fragments with reduced complexity, as found in bisulfite converted DNA, where most if not all cytosines are converted to thymidine. Thus, for example, the same CpG sites can be interrogated in non-bisulfite-converted DNA by using a microarray including probes designed to hybridize to the same regions of native, non-bisulfite-converted DNA. One of skill in the art could readily obtain such a microarray. In one embodiment, a custom array could be designed using the manifest for an array such as the Infinium MethylationEPIC BeadChip, by using the “Forward Sequence” to identify a probe sequence including native DNA sequence that covers a similar or identical sequence region for the allele-specific probe sequences, which are designed to hybridize to DNA sequences where most or all cytosines have been converted to thymidine. Using such an array designed to hybridize to native (non-bisulfite-converted) DNA sequences, the methodologies and analysis methods described in the Methylation Protocol Guide for the Infinium HD Assay from Illumina (San Diego, CA) could be followed to identify methylated CpG sites in the sample DNA.

### Compositions

[0380] The present disclosure also provides compositions that include a methyltransferase and an ACD described herein. The composition can include one or more additional other components in addition to the methyltransferase and the ACD. For example, the other component can include a cofactor, such as SAM or XSAM. The other component can additionally or alternatively include a single-stranded DNA or RNA substrate that includes, or is suspected of including, at least one modified cytosine, such as a 5-methyl cytosine, a 5-hydroxymethyl cytosine, a 5-formyl cytosine (5fC), a 5-carboxy cytosine (5CaC), or a combination thereof. In another example, a single-stranded DNA or RNA substrate can be one including one or more known modified cytosine, e.g., a single-stranded DNA or RNA substrate that can be used as a control to measure conversion efficiency. In another example, the other component can include a buffer, such as a buffer described herein, for example a citrate buffer, a sodium acetate buffer, or a Bis-Tris buffer, or HEPES. In another example, the other component can include a reductant, including but not limited to, DTT and/or TCEP, as well as Zn, or a denaturant, such as DMSO or betaine.

[0381] A composition can include a polynucleotide encoding a methyltransferase described herein, an ACD described herein, or both. The polynucleotide can be present in a vector, such as a plasmid or virus vector. A vector that includes the polynucleotide can be present in a host cell, such as E. coli.

### Kits

[0382] The present disclosure also provides kits for determining the methylation status of DNA or RNA. A kit includes at least one methyltransferase described herein and at least one ACD described herein and one or more other components in a suitable packaging material in an amount sufficient for at least one reaction. Examples of other components include a positive control nucleic acid, such as a single-stranded DNA including one or more known modified cytosines for use in measuring conversion efficiency, or a negative control nucleic acid, such as a single-stranded DNA including unmodified cytosines. Another component can be a glucosyltransferase, such as T4-beta glucosyltransferase. Optionally, other reagents such as buffers and solutions needed to use the methyltransferase and the ACD and nucleotide solution are also included. Instructions for use of the packaged components are also typically included.

[0383] As used herein, the phrase “packaging material” refers to one or more physical structures used to house the contents of the kit. The packaging material is constructed by known methods, preferably to provide a sterile, contaminant-free environment. The packaging material has a label which indicates that the components can be used for determining the methylation status of DNA or RNA. In addition, the packaging material contains instructions indicating how the materials within the kit are employed to practice one or more reactions with a methyltransferase and an ACD. As used herein, the term “package” refers to a solid matrix or material such as glass, plastic, paper, foil, and the like, capable of holding within fixed limits the polypeptides. “Instructions for use” typically include a tangible expression describing the reagent concentration or at least one assay method parameter, such as the relative amounts of reagent and sample to be admixed, maintenance time periods for reagent/sample admixtures, temperature, buffer conditions, and the like.

[0384] The invention is defined in the claims. However, below there is provided a non-exhaustive listing of non-limiting exemplary aspects. Any one or more of the features of these aspects may be combined with any one or more features of another example, embodiment, or aspect described herein.

### EXEMPLARY ASPECTS

[0385] Aspect 1 is a method of detecting methylated cytosine comprising:
[0386] (a) providing a sample comprising a target nucleic acid suspected of comprising single-stranded DNA comprising at least one unmodified cytosine and at least one modified cytosine comprising 5-methyl cytosine (5mC), 5-hydroxymethyl cytosine (5hmC), 5-formyl cytosine (5fC), or 5-carboxy cytosine (5CaC);
[0387] (b) protecting the at least one unmodified cytosine (C) in the target nucleic acid from deamination by adding a protective group to the 5 position of the at least one unmodified C to form a protected C; and
[0388] (c) contacting the target nucleic acid with an altered cytosine deaminase (ACD) after step (b) to form converted single-stranded DNA.

[0389] Aspect 2 is the method of aspect 1, wherein a methyltransferase enzyme adds the protective group to the 5 position of the at least one unmodified C.

[0390] Aspect 3 is the method of any preceding aspect, wherein the methyltransferase enzyme catalyzes addition of the protective group from an S-adenosyl-L-methionine analog (XSAM).

[0391] Aspect 4 is the method of any preceding aspect, wherein the methyltransferase enzyme comprises M.MpeI, M.MpeI N374K, M.MpeI N374R, DNMT1, DNMT3A, DNMT3B, dam, or CpG (M.SssI).

[0392] Aspect 5 is the method of any preceding aspect, wherein the methyltransferase enzyme catalyzes addition of the protective group to unmodified C at a higher rate than the methyltransferase enzyme catalyzes addition of the protective group to one or more of 5mC, 5hmC, 5fC, or 5CaC.

[0393] Aspect 6 is the method of any preceding aspect, wherein the methyltransferase enzyme does not catalyze addition of the protective group to one or more of 5mC, 5hmC, 5fC, or 5CaC at a detectable rate.

[0394] Aspect 7 is the method of any preceding aspect wherein the methyl group of the 5mC, the hydroxymethyl group of the 5hmC, the formyl group of the 5fC, or the carboxy group of the 5CaC inhibits addition of the protective group.

[0395] Aspect 8 is the method of any preceding aspect, wherein the protective group comprises an alkyne group, a carboxyl group, an amino group, a hydroxymethyl group, an isopropyl group, or a dye.

[0396] Aspect 9 is the method of any preceding aspect, wherein the XSAM comprises carboxymethyl SAM.

[0397] Aspect 10 is the method of any preceding aspect, wherein the protective group inhibits activity of the ACD.

[0398] Aspect 11 is the method of any preceding aspect, wherein the ACD does not modify the protected C.

[0399] Aspect 12 is the method of any preceding aspect, wherein the ACD deaminates the at least one modified C.

[0400] Aspect 13 is the method of any preceding aspect, wherein the ACD is based on a member of the APOBEC family.

[0401] Aspect 14 is the method of any preceding aspect, wherein the ACD is based on a member of the AID subfamily, the APOBEC1 subfamily, the APOBEC2 subfamily, the APOBEC3A subfamily, the APOBEC3B subfamily, the APOBEC3C subfamily, the APOBEC3D subfamily, the APOBEC3F subfamily, the APOBEC3G subfamily, the APOBEC3H subfamily, or the APOBEC4 subfamily.

[0402] Aspect 15 is the method of any preceding aspect, wherein the ACD is based on a member of the APOBEC3A subfamily.

[0403] Aspect 16 is the method of any preceding aspect, wherein the ACD comprises a ZDD motif (H-[P/A/V]-E-X_{[23-28]}-P-C-X_{[2-4]}-C (SEQ ID NO:12)), wherein the ACD comprises the motif X_{[16-26]9}-GRXXTXLCYXV-X₁₅-GXXXN-X₁₂-HAEXXF-X₁₄-YXXTWXXSWSPC-X [2-4]-CA-X₅-FL-X₇-LXIXXXR(L/I)Y-X₈-GLXXLXXXG-X₅-M-X₄-FXXCWXXFV-X₆-FXPW-X₁₃-LXXI-X_{[2-6]} (SEQ ID NO:14), or both.

[0404] Aspect 17 is the method of any preceding aspect, wherein the ACD is based on APOBEC3A (SEQ ID NO:3).

[0405] Aspect 18 is the method of any preceding aspect, wherein the ACD comprises one or more stability-enhancing alterations, preferably two or more stability-enhancing alterations.

[0406] Aspect 19 is the method of any preceding aspect, wherein the one or more stability-enhancing alteration is a substitution mutation, a deletion, an insertion, or a combination thereof.

[0407] Aspect 20 is the method of any preceding aspect, wherein the one or more stability-enhancing alterations comprises a substitution mutation at a position functionally equivalent to a position selected from Table 4.

[0408] Aspect 21 is the method of any preceding aspect, wherein the ACD comprises one or more stability-enhancing alterations is selected from substitution mutations at a position functionally equivalent to H11X, L12X, D14X, H16X, 117X, T19X, S20X, N21X, G25X, 126X, G27X, R28X, H29X, T31X, C34X, E38X, R39X, D41X, N42X, S45X, K47X, M48X, H51X, F54X, H56X, N57X, A59X, K60X, L62X, Y67X, L73X, R74X, D77X, L78X, V79X, P80X, S81X, D85X, A87X, 189X, Y90X, R91X, T93X, W94X, 196X, S97X, C101X, F102X, S103X, W104X, G105X, C106X, A107X, G108X, E109X, V110X, R111X, A112X, L114X, Q115X, E116X, N117X, T118X, H119X, V120X, L122X, R123X, R128X, L135X, Y136X, E138X, A139X, Q141X, M142X, D145X, A146X, A148X, D156X, E157X, K159X, C161X, D163X, T164X, D167X, Q169X, C171X, D177X, D180X, H182X, S183X, Q184X, A185X, L186X, S187X, G188X, R189X, A192X, N196X, a deletion selected from AM1-L12, AE36-G53, AN61-G68, AW104-G105, AQ195-N199, AI26-G27, and combinations thereof,
[0409] wherein the position number designation is functionally equivalent to the position in a wild-type APOBEC3A (SEQ ID NO:3) and X is an amino acid substitution different from the wild-type amino acid at that position.

[0410] Aspect 22 is the method of any preceding aspect, wherein the one or more stability-enhancing alterations to the ACD comprises a substitution mutation at a position functionally equivalent to a stability-enhancing mutation selected from Table 5.

[0411] Aspect 23 is the method of any preceding aspect, wherein the one or more stability-enhancing alterations to the ACD comprises a deletion selected from Table 6.

[0412] Aspect 24 is the method of any preceding aspect, wherein the one or more stability-enhancing alterations to the ACD comprises at least one substitution and at least one deletion, wherein the substitution mutation is at a position functionally equivalent to a stability-enhancing mutation selected from Table 5, and the deletion is a deletion selected from Table 6.

[0413] Aspect 25 is the method of any preceding aspect, wherein the one or more alterations to the ACD comprises a deletion selected from Table 6 and one or more ancillary substitution mutations.

[0414] Aspect 26 is the method of any preceding aspect, wherein the deletion and one or more ancillary substitution mutations of the ACD is ΔN61-G68/A59P/K60R, ΔN61-G68/A59L/R69Y, ΔN61-G68/A59L/K60E/R69N, ΔN61-G68/A59P/K60E/R69H, ΔN61-G68/A59P/K60Q/R69H, ΔN61-G68/A59L/R69N, ΔN61-G68/R69D, ΔN61-G68/A59L/K60R, ΔN61-G68/A59P/K60G/R69L, ΔW104-G105/F102R, ΔW104-G105/S103N, ΔW104-G105/F102R/S103N, ΔW104-G105/Δ1-12, ΔW104-G105/Δ1-12/F102R, ΔW104-G105/Δ1-12/S103N or ΔW104-G105/Δ1-12/F102R/S103N.

[0415] Aspect 27 is the method of any preceding aspect, wherein the ACD comprises a combination of stability-enhancing alterations selected from Table 4, 5, or 6.

[0416] Aspect 28 is the method of any preceding aspect, wherein the ACD comprises 5mC-selective deaminase activity.

[0417] Aspect 29 is the method of any preceding aspect, wherein the ACD comprises one or more alterations that provide the 5mC-selective deaminase activity.

[0418] Aspect 30 is the method of any preceding aspect, wherein the one or more alterations comprises an alteration at one or more positions within the ACD.

[0419] Aspect 31 is the method of any preceding aspect, wherein the one or more alterations comprises (Tyr/Phe) 130X substitution, wherein X is selected from A, G, F, H, Q, M, N, K, V, D, E, S, C, P or T.

[0420] Aspect 32 is the method of any preceding aspect, wherein the ACD further comprises Tyr132X, wherein X is selected from R, H, L or Q.

[0421] Aspect 33 is the method of any preceding aspect, wherein the ACD comprises Y130A and Y132H.

[0422] Aspect 34 is the method of any preceding aspect, wherein the ACD further comprises at least one selectivity-enhancing alteration, and wherein the at least one selectivity-enhancing alteration is a substitution mutation at a position functionally equivalent to D133.

[0423] Aspect 35 is the method of any preceding aspect, wherein the substitution mutation at a position functionally equivalent to D133 is D133W or D133C.

[0424] Aspect 36 is the method of any preceding aspect, wherein the ACD comprises Y130X, Y132X and D133X, wherein X is an amino acid substitution that enhances selectivity for 5mC.

[0425] Aspect 37 is the method of any preceding aspect, wherein ACD comprises Y130A, Y132H and D133W.

[0426] Aspect 38 is the method of any preceding aspect, the ACD comprises any one of SEQ ID NO:68-77.

[0427] Aspect 39 is the method of any preceding aspect, wherein the ACD comprises SEQ ID NO:69.

[0428] Aspect 40 is the method of any preceding aspect, wherein the ACD comprises 5hmC-defective deaminase activity.

[0429] Aspect 41 is the method of any preceding aspect, wherein the ACD comprises one or more alterations that provide the 5hmC-defective deaminase activity.

[0430] Aspect 42 is the method of any preceding aspect, wherein the one or more alterations comprises an alteration at one or more positions within the ACD.

[0431] Aspect 43 is the method of any preceding aspect, wherein the one or more alterations to the ACD comprise an alteration at a position functionally equivalent to (Tyr/Phe) 130 to W.

[0432] Aspect 44 is the method of any preceding aspect, wherein the ACD further comprises at least one selectivity-enhancing substitution mutation at position D133, wherein the substitution mutation is a mutation to W, C, D, K, or R.

[0433] Aspect 45 is the method of any preceding aspect, wherein the substitution mutation is D133W or D133C.

[0434] Aspect 46 is the method of any preceding aspect, wherein the ACD comprises any one of SEQ ID NOs: 144-153.

[0435] Aspect 47 is the method of any preceding aspect, wherein the ACD comprises SEQ ID NO: 144.

[0436] Aspect 48 is the method of any preceding aspect, wherein the ACD comprises a dimerized altered cytidine deaminase (dACD) comprising a first cytidine deaminase comprising a first cytidine deaminase and a second cytidine deaminase.

[0437] Aspect 49 is the method of any preceding aspect, wherein the first cytidine deaminase, the second cytidine deaminase, or both the first cytidine deaminase and the second cytidine deaminase comprise an ACD comprising one or more alterations.

[0438] Aspect 50 is the method of any preceding aspect, wherein the first cytidine deaminase or the second cytidine deaminase, or both the first and the second cytidine deaminase comprises a substitution mutation of Asp133 to Val (D133V).

[0439] Aspect 51 is the method of any preceding aspect, wherein the first cytidine deaminase or the second cytidine deaminase, or both the first and the second cytidine deaminase comprises 5mC- and 5hmC-preferring deaminase activity.

[0440] Aspect 52 is the method of any preceding aspect, wherein the first cytidine deaminase, the second cytidine deaminase, or both the first and the second cytidine deaminase comprises a substitution mutation at a position functionally equivalent to (Tyr/Phe) 130 to Ala.

[0441] Aspect 53 is the method of any preceding aspect, wherein the first cytidine deaminase, the second cytidine deaminase, or both the first and the second cytidine deaminase comprises a substitution mutation at a position functionally equivalent to Tyr132 to His.

[0442] Aspect 54 is the method of any preceding aspect, wherein the first cytidine deaminase, the second cytidine deaminase, or both the first and the second cytidine deaminase comprises a substitution mutation at a position functionally equivalent to (Tyr/Phe) 130 to A and a substitution mutation at a position functionally equivalent to Tyr132 to His.

[0443] Aspect 55 is the method of any preceding aspect, wherein the first cytidine deaminase, the second cytidine deaminase, or both the first and the second cytidine deaminase comprises any one of SEQ ID NOs: 154-162.

[0444] Aspect 56 is the method of any preceding aspect, wherein the first cytidine deaminase, the second cytidine deaminase, or both the first and the second cytidine deaminase comprises SEQ ID NOs: 271.

[0445] Aspect 57 is the method of any preceding aspect, wherein contacting the target nucleic acid with an altered cytosine deaminase (ACD) after step (b) comprises contacting the target nucleic acid with a first ACD and a contacting the target nucleic acid with a second ACD.

[0446] Aspect 58 is the method of any preceding aspect, wherein the first ACD comprises a first preferential deaminase activity and the second ACD comprises a second preferential deaminase activity, wherein the first preferential deaminase activity and the second preferential deaminase activity are different.

[0447] Aspect 59 is a method of detecting methylated cytosine comprising:
[0448] (a) providing a sample comprising a target nucleic acid suspected of comprising single-stranded DNA comprising at least one modified C comprising 5mC, 5hmC, 5fC, or 5CaC;
[0449] (b) protecting at least one unmodified C in the target nucleic acid from deamination by adding a protective group to the 5 position of the at least one unmodified C to provide a protected target nucleic acid;
[0450] (c1) contacting a first aliquot of the protected target nucleic acid with a first altered ACD after step (b); and
[0451] (c2) contacting a second aliquot of the protected target nucleic acid with a second ACD after step (b) to form a converted single-stranded DNA.

[0452] Aspect 60 is the method of any preceding aspect, wherein the first ACD comprises 5mC-selective deaminase activity.

[0453] Aspect 61 is the method of any preceding aspect, wherein the second ACD comprises 5mC-, 5hmC-preferring activity.

[0454] Aspect 62 is the method of any preceding aspect, wherein protecting at least one unmodified C in the target nucleic acid comprises contacting the target nucleic acid with a methyltransferase enzyme for at least one hour.

[0455] Aspect 63 is the method of any preceding aspect, further comprising processing the converted single-stranded DNA to produce a sequencing library.

[0456] Aspect 64 is the method of any preceding aspect, wherein the processing comprises amplifying the converted single-stranded DNA to produce double-stranded DNA.

[0457] Aspect 65 is the method of any preceding aspect, wherein the processing comprises fragmentation or tagmentation of the double-stranded DNA and addition of a universal sequence to the double-stranded DNA fragments.

[0458] Aspect 66 is the method of any preceding aspect, wherein the universal sequence is part of an adapter added to the double-stranded DNA fragments.

[0459] Aspect 67 is the method of any preceding aspect, wherein processing comprises:
[0460] providing a surface comprising a plurality of amplification sites,
[0461] wherein the amplification sites comprise at least two populations of attached single-stranded capture oligonucleotides having a free 3′ end, and
[0462] contacting the surface comprising amplification sites with the sequencing library under conditions suitable to produce a plurality of amplification sites that each comprise a clonal population of amplicons from an individual member of the sequencing library.

[0463] Aspect 68 is the method of any preceding aspect, further comprising detecting the at least one unmodified C and the at least one deaminated modified cytosine in the nucleic acid.

[0464] Aspect 69 is the method of any preceding aspect, wherein the ACD has 5mC-selective deaminase activity, wherein the detecting comprises identifying thymidine nucleotides in the converted nucleic acid to determine the location of 5mC nucleotides in the target nucleic acid.

[0465] Aspect 70 is the method of any preceding aspect, wherein the ACD has 5hmC-defective deaminase activity, wherein the detecting comprises identifying cytosine nucleotides in the converted nucleic acid to determine the location of 5hmC nucleotides in the target nucleic acid.

[0466] Aspect 71 is the method of any preceding aspect, wherein the ACD has 5mC- and 5hmC-preferring deaminase activity, wherein the detecting comprises identifying cytosine nucleotides in the converted nucleic acid to determine the location of 5hmC and 5mC nucleotides in the target nucleic acid.

[0467] Aspect 72 is the method of any preceding aspect, wherein the detecting comprises sequencing the converted nucleic acids or hybridizing one or more nucleic acid probes to the converted nucleic acids.

[0468] Aspect 73 is the method of any preceding aspect, wherein the detecting comprises sequencing the converted nucleic acids, the method further comprising:
[0469] (c) comparing the sequence of the converted nucleic acids with an untreated reference sequence to determine which cytosines in the target nucleic acids are modified.

[0470] Aspect 74 is the method of any preceding aspect, wherein a predetermined sequence of the untreated reference sequence and a predetermined sequence of the converted nucleic acid are compared.

[0471] Aspect 75 is the method of any preceding aspect, wherein the predetermined sequence comprises a CpG island or a promoter.

[0472] Aspect 76 is the method of any preceding aspect, wherein the detecting comprises hybridizing the converted nucleic acids to the nucleic acid probes, optionally wherein the nucleic acid probes are present on an analyte array, the method further comprising sequencing the hybridized converted nucleic acids.

[0473] Aspect 77 is the method of any preceding aspect, wherein the detecting comprises hybridizing the converted nucleic acids to the nucleic acid probes, the method further comprising amplifying the converted nucleic acid, wherein the nucleic acid probes comprise two primers for amplification of a predetermined sequence, wherein the primers anneal to regions of converted nucleic acids comprising at least one converted cytosine with a greater affinity than to the regions of converted nucleic acids wherein at least one cytosine is not a converted cytosine, wherein the presence of an amplified product is indicative of a modified cytosine in the target nucleic acid.

[0474] Aspect 78 is the method of any preceding aspect, wherein the detecting comprises hybridizing the converted nucleic acids to the nucleic acid probes, the method further comprising cleaving a single stranded DNA (ssDNA) reporter substrate by a CRISPR-based system, wherein the ssDNA reporter substrate comprises a fluorophore and a quencher, wherein the presence of fluorescence is indicative of a modified cytosine in the target nucleic acid.

[0475] Aspect 79 is the method of any preceding aspect, wherein the CRISPR-based system comprises a guide RNA sequence that anneals to a predetermined sequence of a nucleic acid comprising at least one converted cytosine and anneals at lower affinity to the predetermined sequence of the nucleic acid when at least one cytosine is not a converted.

[0476] Aspect 80 is the method of any preceding aspect, wherein the CRISPR-based system comprises CRISPR-Cas12.

[0477] Aspect 81 is the method of any preceding aspect, wherein the detecting comprises hybridizing the converted nucleic acids to the nucleic acid probes, wherein the converted nucleic acids are present in a fixed cell, wherein the nucleic acid probes comprise a fluorescent labeled probe, and wherein the nucleic acid probes anneal to a predetermined sequence of converted nucleic acids comprising at least one converted cytosine with a greater affinity than to aregion of converted nucleic acids wherein at least one cytosine is not a converted cytosine, wherein the presence of cell-associated fluorescence is indicative of a modified cytosine in the target nucleic acid.

[0478] Aspect 82 is the method of any preceding aspect, the untreated reference sequence is a predetermined sequence.

[0479] Aspect 83 is the method of any preceding aspect, wherein the at least one modified cytosine is a 5mC or a 5hmC.

[0480] Aspect 84 is the method of any preceding aspect, further comprising providing the target nucleic acids, wherein the providing comprises preparing single stranded (ss) DNA from a sample comprising the target nucleic acids.

[0481] Aspect 85 is the method of any preceding aspect, wherein the target nucleic acids are genomic DNA or cell free DNA.

[0482] Aspect 86 is the method of any preceding aspect, wherein the genomic DNA is from a single cell or is a mixture from a plurality of cells.

[0483] Aspect 87 is the method of any preceding aspect, wherein the sequencing comprises processing the converted nucleic acids to produce a sequencing library.

[0484] Aspect 88 is the method of any preceding aspect, further comprising:
[0485] providing a surface comprising a plurality of amplification sites,
[0486] wherein the amplification sites comprise at least two populations of attached single-stranded capture oligonucleotides having a free 3′ end, and
[0487] contacting the surface comprising amplification sites with the sequencing library under conditions suitable to produce a plurality of amplification sites that each comprise a clonal population of amplicons from an individual member of the sequencing library.

[0488] Aspect 89 is the method of any preceding aspect, wherein the target nucleic acids are obtained from a subject, wherein the detecting comprises obtaining a pattern of cytosine modification in the converted nucleic acids, the method further comprising comparing the pattern of cytosine modification in the converted nucleic acids with the pattern of cytosine modification in a reference nucleic acid.

[0489] Aspect 90 is the method of any preceding aspect, wherein the subject has or is at risk of having a disease or condition, wherein the reference nucleic acid is from a normal subject.

[0490] Aspect 91 is the method of any preceding aspect, wherein the pattern of cytosine modification is linked in-cis to a coding region that is correlated with a disease or condition.

[0491] Aspect 92 is the method of any preceding aspect, wherein the pattern of cytosine modification is linked in-cis to a coding region, wherein the coding region in the reference nucleic acid is transcriptionally active or transcriptionally inactive, wherein the comparing further comprises determining if the pattern of cytosine modification of the converted nucleic acid indicates the coding region is transcriptionally active or transcriptionally inactive in the subject.

[0492] Aspect 93 is the method of any preceding aspect, wherein transcription of the coding region is correlated with a disease or condition.

[0493] Aspect 94 is the method of any preceding aspect, wherein the subject has the disease or condition and is undergoing treatment for the disease or condition, the method further comprising determining if the treatment is correlated with a change in the pattern of cytosine modification in the subject.

[0494] Aspect 95 is the method of any preceding aspect, wherein the subject previously had the disease or condition, the method further comprising comparing the pattern of cytosine modification in the subject with the pattern of cytosine modification in the subject when the subject had the disease or condition.

[0495] Aspect 96 is a method of detecting methylated cytosine comprising:
[0496] (a) providing a sample comprising a target nucleic acid suspected of comprising at least one unmodified cytosine (C) and least one 5-methyl cytosine (5mC), at least one 5-hydroxymethyl cytosine (5hmC), at least one 5-formyl cytosine (5fC), at least one 5-carboxy cytosine (5CaC), or a combination thereof;
[0497] (b) contacting the target nucleic acid with an altered methyltransferase having carboxy-methyltransferase activity and carboxy-S-adenosyl-L-methionine substrate rendering the at least one unmodified C in the target nucleic acid resistant to deamination and forming a treated nucleic acid;
[0498] (c) contacting the treated nucleic acid of step (b) with an altered cytosine deaminase that preferentially converts 5-methylcytosine (5mC) to thymidine (T) to form a converted nucleic acid; and
[0499] (d) identifying the unmodified C, 5mC and 5hmC present in the target nucleic acid.

[0500] Aspect 97 is the method of any preceding aspect, wherein the sample comprises single stranded DNA.

[0501] Aspect 98 is the method of any preceding aspect, wherein the sample is fragmented or sheared prior to step (A).

[0502] Aspect 99 is the method of any preceding aspect, wherein the method further comprises processing the converted nucleic acid to produce a sequencing library before step (D).

[0503] Aspect 100 is the method of any preceding aspect, wherein step (D) comprises sequencing.

[0504] Aspect 101 is the method of any preceding aspect, wherein the sample is amplified prior to sequencing.

[0505] Aspect 102 is the method of any preceding aspect, wherein the altered methyltransferase having carboxy-methyltransferase activity comprises M.MpeI N374K (SEQ ID NO: 142) or M.MpeI N374K (SEQ ID NO:141).

[0506] Aspect 103 is the method of any preceding aspect, wherein the target nucleic acid comprises genomic DNA.

[0507] Aspect 104 is the method of any preceding aspect, wherein the processing comprises fragmentation or tagmentation of the double-stranded DNA and addition of a universal sequence to the double-stranded DNA fragments.

[0508] Aspect 105 is the method of any preceding aspect, wherein the universal sequence is part of an adapter added to the double-stranded DNA fragments.

[0509] Aspect 106 is the method of any preceding aspect, wherein the processing comprises amplifying the converted single-stranded DNA to be the converted double-stranded DNA.

[0510] Aspect 107 is the method of any preceding aspect, wherein the sample is a biological sample, optionally wherein the biological sample comprises (i) cell-free DNA, (ii) a fluid selected from blood or serum, (iii) single cells or isolated nuclei, or (iv) a tissue.

[0511] Aspect 108 is the method of any preceding aspect, further comprising:
[0512] providing a surface comprising a plurality of amplification sites,
[0513] wherein the amplification sites comprise at least two populations of attached single-stranded capture oligonucleotides having a free 3′ end, and
[0514] contacting the surface comprising amplification sites with the sequencing library under conditions suitable to produce a plurality of amplification sites that each comprise a clonal population of amplicons from an individual member of the sequencing library.

[0515] Aspect 109 is a method of detecting the location of a modified cytosine in a target nucleic acid suspected of comprising at least one unmodified cytosine, the method comprising: (a) contacting the target nucleic acid with an altered methyltransferase having carboxy-methyltransferase activity and carboxy-S-adenosyl-L-methionine substrate rendering at least one unmodified cytosine (C) in the target nucleic acid resistant to deamination to form a treated nucleic acid;
[0516] (b) contacting the treated nucleic acid of (a) with an ACD to produce a converted nucleic acid comprising at least one converted cytosine; and
[0517] (c) detecting the at least one converted cytosine in the converted nucleic acid.

[0518] Aspect 110 is the method of any preceding aspect, wherein the ACD has cytosine-defective deaminase activity, wherein the detecting comprises identifying thymidine nucleotides in the converted nucleic acid to determine the location of 5mC nucleotides in the target nucleic acid.

[0519] Aspect 111 is the method of any preceding aspect, wherein the ACD has 5hmC-defective deaminase activity, wherein the detecting comprises identifying cytosine nucleotides in the converted nucleic acid to determine the location of 5hmC nucleotides in the target nucleic acid.

[0520] Aspect 112 is the method of any preceding aspect, wherein the detecting comprises sequencing the converted nucleic acids or hybridizing one or more nucleic acid probes to the converted nucleic acids.

[0521] Aspect 113 is the method of any preceding aspect, wherein the detecting comprises sequencing the converted nucleic acids, the method further comprising:
[0522] (d) comparing the sequence of the converted nucleic acids with an untreated reference sequence to determine which cytosines in the target nucleic acid are modified.

[0523] Aspect 114 is the method of any preceding aspect, wherein a predetermined sequence of the untreated reference sequence and a predetermined sequence of the converted nucleic acid are compared.

[0524] Aspect 115 is the method of any preceding aspect, wherein the predetermined sequence comprises a CpG island or a promoter.

[0525] Aspect 116 is the method of any preceding aspect, wherein the detecting comprises hybridizing the converted nucleic acids to the nucleic acid probes, optionally wherein the nucleic acid probes are present on an analyte array, the method further comprising sequencing the hybridized converted nucleic acids.

[0526] Aspect 117 is the method of any preceding aspect, wherein the detecting comprises hybridizing the converted nucleic acids to the nucleic acid probes, the method further comprising amplifying the converted nucleic acid, wherein the nucleic acid probes comprise two primers for amplification of a predetermined sequence, wherein the primers anneal to regions of converted nucleic acids comprising at least one converted cytosine with a greater affinity than to the regions of converted nucleic acids wherein at least one cytosine is not a converted cytosine, wherein the presence of an amplified product is indicative of a modified cytosine in the target nucleic acid.

[0527] Aspect 118 is the method of any preceding aspect, wherein the at least one modified cytosine is a 5mC or a 5hmC.

[0528] Aspect 119 is the method of any preceding aspect, further comprising providing the target nucleic acid, wherein the providing comprises preparing single stranded (ss) DNA from a sample comprising the target nucleic acid.

[0529] Aspect 120 is the method of any preceding aspect, wherein the target nucleic acid comprises genomic DNA or cell free DNA.

[0530] Aspect 121 is the method of any preceding aspect, wherein the genomic DNA is from a single cell or is a mixture from a plurality of cells.

[0531] Aspect 122 is the method of any preceding aspect, wherein the sequencing comprises processing the converted nucleic acids to produce a sequencing library.

[0532] Aspect 123 is the method of any preceding aspect, further comprising:
[0533] providing a surface comprising a plurality of amplification sites,
[0534] wherein the amplification sites comprise at least two populations of attached single-stranded capture oligonucleotides having a free 3′ end, and
[0535] contacting the surface comprising amplification sites with the sequencing library under conditions suitable to produce a plurality of amplification sites that each comprise a clonal population of amplicons from an individual member of the sequencing library.

[0536] Aspect 124 is the method of any preceding aspect, wherein the target nucleic acid is obtained from a subject, wherein the detecting comprises obtaining a pattern of cytosine modification in the converted nucleic acids, the method further comprising comparing the pattern of cytosine modification in the converted nucleic acids with the pattern of cytosine modification in a reference nucleic acid.

[0537] Aspect 125 is the method of any preceding aspect, wherein the subject has or is at risk of having a disease or condition, wherein the reference nucleic acid is from a normal subject.

[0538] Aspect 126 is the method of any preceding aspect, wherein the pattern of cytosine modification is linked in-cis to a coding region that is correlated with a disease or condition.

[0539] Aspect 127 is the method of any preceding aspect, wherein the pattern of cytosine modification is linked in-cis to a coding region, wherein the coding region in the reference nucleic acid is transcriptionally active or transcriptionally inactive, wherein the comparing further comprises determining if the pattern of cytosine modification of the converted nucleic acid indicates the coding region is transcriptionally active or transcriptionally inactive in the subject.

[0540] Aspect 128 is the method of any preceding aspect, wherein transcription of the coding region is correlated with a disease or condition.

[0541] Aspect 129 is the method of any preceding aspect, wherein the subject has a disease or condition and is undergoing treatment for the disease or condition, the method further comprising determining if the treatment is correlated with a change in the pattern of cytosine modification in the subject.

[0542] Aspect 130 is the method of any preceding aspect, wherein the subject previously had a disease or condition, the method further comprising comparing the pattern of cytosine modification in the subject with the pattern of cytosine modification in the subject when the subject had the disease or condition.

[0543] Aspect 131 is the method of any preceding aspect, wherein the sample comprises a methylated control nucleic acid.

[0544] Aspect 132 is the method of any preceding aspect, wherein the sample is obtained from cancer cells or blood of a pregnant woman.

[0545] Aspect 133 is the method of any preceding aspect, wherein the sample comprises cell free DNA.

### EXAMPLES

[0546] The present disclosure is illustrated by the following examples. It is to be understood that the particular examples, materials, amounts, and procedures are to be interpreted broadly in accordance with the scope and spirit of the disclosure as set forth herein.

### Example 1

### Detection of 5mC and 5hmC

[0547] Human genomic DNA is combined with fully unmethylated lambda control DNA

[0548] (New England Biolabs) and enzymatically CpG methylated pUC19 control DNA and mechanically sheared to give fragments of approximately ~300 bp. This sheared DNA (10-100 ng) is then subjected to end-repair, A-tailing and adapter ligation according to standard Illumina library preparation procedures. The sample is then split into 2 aliquots to enable differential treatment.

[0549] One of the aliquots of the adapter-ligated DNA is glucosylated using UDP-glucose and T4 β-glucosyltransferase (βGT, NEB). Specifically, the sample is treated with 0.5 U/uL of T4 βGT (NEB) in 1X CutSmart Buffer (NEB) with 40 μM UDP-Glucose at 37° C. for 3 hr. A control reaction is assembled using the other aliquot of the DNA sample, omitting the T4 βGT enzyme. Subsequently, the samples are optionally SPRI purified and then denatured via incubation in 0.02 N sodium hydroxide at 50° C. for 10 minutes. Subsequently, ssDNA samples are enzymatically deaminated in 50 mM Bis-Tris (pH 6.5), 10 μg/mL RNAse A with the cytidine deaminase (200 nM) for 25 minutes at 37C. The libraries are then PCR amplified using unique-dual indexing primers and Q5U (New England Biolabs) using 9 cycles of PCR. Samples are sequenced on a NovaSeq6000 and analysis is performed with DRAGEN Methylation Pipeline. The methylation calls between the two treatment conditions (+/−T4 BGT) are compared in order to determine which sites were hydroxymethylated. Bases that are detected as methylated in both sample treatments are assigned mC, whereas bases that are detected as methylated in the βGT condition and unmethylated in the +βGT condition are assigned hmC (FIG. 5).

### Example 2

### Protein Expression and Purification.

[0550] Constructs containing coding regions encoding altered cytidine deaminases (ACDs) with substitutions mutations predicted to increase stability were produced. The substitutions mutations were present in a scaffold having Y130A/Y132H/C171A (SEQ ID NO: 68). Constructs were transformed using BL21 (DE3) cells and expressed in 50 mL of autoinduction media composed by terrific broth, 0.2% lactose, and kanamycin. The cultures were incubated at 37° C. for 6 h, and then 16° C. overnight. The cell pellets were harvested by centrifugation, resuspended in BugBuster® Protein Extraction Reagent and proteins were purified using HisPur™ Ni-NTA spin columns. The eluates were desalted into 20 mM Tris, 200 mM NaCl, 1 mM DTT, 5% glycerol, and 0.01% tween, and concentrated to ~ 2 mg/mL. Analysis by SDS-PAGE gel revealed the purity to be ~70-80%.

### Tm Measurement (FIG. 7A).

[0551] The melting temperature (Tₘ) of the constructs was determined by DSF (differential scanning fluorimetry). Samples were diluted to 1 mg/mL in storage buffer (20 mM Tris, 200 mM NaCl, 1 mM DTT, 5% glycerol and 0.01% tween pH 7.5) and measured in duplicate witha temperature range from 25-100 C and a heating rate of 1° C./min. Analysis of the minimum of differential curves allowed determination of the Tm.

LC/MS Activity Assay with Temperature Profile (FIG. 7B).

[0552] Temperature profiles for 5mC and C conversion were determined for each stability mutant using an LC/MS assay. In a typical assay, 1 μM final concentration of enzyme was incubated with 250 nM methylated substrate at 6 different temperatures (30, 35, 40, 45, 50, and 55° C.) for 60 minutes. Reactions were quenched by heating at 95° C. for 5 minutes. The DNA was purified by desalting using ZYMO Oligo Clean and Concentrator followed by digestion using NEB Nucleoside Digestion Mix at 37° C. overnight. The digested samples were analyzed by LC/MS on an Agilent Triple Quadrupole, and the single nucleotides quantified by MS/MS. The fraction of 5mC or dC converted was determined based on the relative amounts of 5mdC, dC, dT and dU compared to the untreated substrate.

### SUMMARY

[0553] FIGS. 7A and 7B show the results of selected substitution mutations evaluated when present in the scaffold Y130A/Y132H/C171A (SEQ ID NO:68). Table 5 includes the results shown in FIG. 7A. FIGS. 9 and 10 show the summary of the mutations tested as described in Examples 2, 3, and 4.

### Example 3

### Protein Expression and Purification.

[0554] Constructs containing coding regions encoding ACDs with substitutions mutations predicted to increase stability were produced. The substitutions mutations were present in a scaffold having Y130A/Y132H/D133W/R74L/T19Y/C171A (SEQ ID NO:72). Constructs were transformed in BL21 (DE3) and expressed at 37° C. for 6 hours, and then incubated overnight at room temperature with autoinduction media (terrific broth supplemented with kanamycin and 0.2% lactose) in a 96 deep well plate. The cell pellets were harvested by centrifugation, and then resuspended in BugBuster® Protein Extraction Reagent. The lysates were purified using Dynabeads® Ni-NTA and eluted in 50 mM Tris, 300 mM NaCl, 250 mM imidazole, 5% glycerol and 0.01% tween using a KingFisher (Thermofisher) automated instrument. Top hits (downselected from initial screen and moved forward to NGS assay) were expressed and purified using spin columns as previously described for Example 2.

### Activity-Based Screen Using LC/MS (FIG. 8A).

[0555] Purified libraries were screened for activity using an LC/MS assay. Reactions containing 2 μL of enzyme and 250 nM methylated substrate were incubated for 60 minutes in 5 different conditions: reaction buffer (50 mM Tris, 1 mM DTT) at 37 and 45° C., reaction buffer with additives (20% DMSO, 2 M betaine) at 37° C. and 45° C., and reaction buffer with a 10-minute incubation at 45° C. prior to 60 minute incubation at 37° C. Reactions were stopped by incubation at 95° C. for 5 minutes. The DNA was purified by desalting using ZYMO Oligo Clean and Concentrator, followed by digestion using NEB Nucleoside Digestion Mix at 37° C. overnight. The digested samples were analyzed by LC/MS on an Agilent Triple Quadrupole, and the single nucleotides quantified by MS/MS. The fraction of 5mdC or dC converted was determined based on the relative amounts of 5mdC, dC, dT and dU compared to the untreated substrate.

Activity-based screen using sequencing assay with a methylated substrate (FIG. 8B).

[0556] Temperature profiles for 5mdC and dC conversion were determined for each stability mutant hit using an NGS assay. For each reaction, 1 μL of enzyme was incubated with 250 nM methylated substrate at 6 different temperatures (30, 35, 40, 45, 50, and 55° C.) overnight. Reactions were stopped by incubation at 95° C. for 5 minutes. Illumina UD Indexes were added by PCR, and the indexed samples pooled and purified using a 1.8X SPRI bead clean-up. The pool was denatured and diluted in Illumina Hyb Buffer 1 to a final concentration of 1 pM. A 30% spike-in of PhiX was added to the library prior to sequencing on an Illumina MiniSeq.

### SUMMARY

[0557] FIG. 8A and B show the results of selected substitution mutations evaluated when present in the scaffold Y130A/Y132H/D133W/R74L/T19Y/C171A (SEQ ID NO:72). The data is also represented in Table 7.

### Example 4

### Protein Expression and Purification.

[0558] Constructs containing coding regions encoding ACDs with alterations predicted to increase stability were produced. The substitutions mutations were present in a scaffold having Y130A/Y132H/D133W/R74L/T19Y/C171A/G₁₀₈C/G₁₈₈R/G₂₅K/S45W/117T/A59P/K60R/A6 1-68 (SEQ ID NO:75). Constructs were transformed in NEB BL21 (DE3), grown overnight on LB-kanamycin, at 37° C., and expressed in autoinduction media (terrific broth supplemented with kanamycin and 0.2% lactose) in a 96 deep well plate. Cells were incubated at 37° C. for 6 hours, with shaking, then at 20° C. overnight. The cell pellets were harvested by centrifugation, and then resuspended in BugBuster® Protein Extraction Reagent. The lysates were purified using Dynabeads® Ni-NTA and eluted in 50 mM Tris, 300 mM NaCl, 250 mM imidazole, 5% glycerol and 0.01% tween using a KingFisher (Thermofisher) automated instrument.

### Activity-Based Screen Using a Sequencing Assay.

[0559] Purified libraries were screened for activity using an NGS assay with a methylated ultramer substrate. Reactions containing 1 L of enzyme and 50 nM methylated substrate were incubated for 1-4 hours at 65° C. The stability backbone mutant (ScK) was included as a positive control. Reactions were stopped by incubation at 95° C. for 5 minutes. Two PCR steps for annealing were performed to add adapters followed by Illumina UD Indexes for sequencing. Indexed samples were pool and purified using a 1.8X SPRI bead clean-up. The pool was denatured and diluted in Illumina Hyb Buffer 1 to a final concentration of 1 μM. A 30% spike-in of PhiX was added to the library prior to sequencing on an Illumina NextSeq 500.

### SUMMARY

[0560] Table 5 includes the results of other substitution mutations evaluated when present in the scaffold

(SEQ ID NO: 75)
Y130A/Y132H/D133W/R74L/T19Y/C171A/G108C/
G188R/G25K/S45W/I17T/A59P/K60R/Δ61-68

### Example 5

### Protein Expression and Purification.

[0561] Constructs containing coding regions encoding ACDs with alterations predicted to increase stability were produced. Constructs were transformed using BL21 (DE3) cells and expressed in terrific broth media. Proteins from cell lysates were purified using nickel affinity chromatography, followed by heparin and size exclusion columns. Final proteins (stored in 20 mM Tris, 200 mM NaCl, 1 mM DTT, 5% glycerol, and 0.01% tween) were concentrated to ~ 5 mg/mL and confirmed to be ≥95% pure by SDS-PAGE.

### Tm Measurement (FIG. 9)

[0562] The melting temperature (Tₘ) of the constructs was determined by DSF (differential scanning fluorimetry). Samples were diluted to 1 mg/mL in storage buffer (20 mM Tris, 200 mM NaCl, 1 mM DTT, 5% glycerol and 0.01% tween pH 7.5) and measured in duplicate in a temperature range from 25-100° C. with a heating rate of 1° C./min. Analysis of the minimum of differential curves allowed determination of the Tₘ.Activity-based stability assay using a sequencing assay (FIG. 10).

[0563] Temperature profiles for 5mdC and dC conversion were determined for each stability mutant hit using an NGS assay. Enzymes were normalized to 200 nM (final reaction concentration) and incubated with 2.5 ng of a library containing 20% unmethylated lambda, 4% M.SssI CpG methylated pUC19, 76% NA12878. The reactions were incubated for 1 hour at 8 different temperatures. Each reaction was prepared in duplicate with appropriate positive controls. Reactions were stopped by incubation at 95° C. for 10 minutes. Illumina UD Indexes were installed onto samples using PCR. Indexed samples were pooled and purified using a 0.9X SPRI bead clean-up. The pool was denatured and diluted in Illumina Hyb Buffer 1 to a final concentration of 1 μM, and the library was sequenced using Illumina NextSeq 500/550.

### SUMMARY

[0564] FIG. 9 and FIG. 10 shows the results of selected alterations (substitution mutations and optional deletions) when present in different scaffolds on stability and fraction of 5mC converted. SEQ ID NO:72; SEQ ID NO:74; SEQ ID NO:75; SEQ ID NO:77. FIG. 9 also shows the additive effect of stacking mutations. The last three bars show the addition of A126C and addition of Δ104-105, each resulting in an increase of stability.

### Example 6

### Molecular Dynamics-Based Analysis

[0565] Beneficial and/or hindering dynamic couplings for methyl-cytosine deamination were identified as follows. Three replicates of MD simulations were run for different backbones: wild-type, ScK, ScC, ScF, ScK. All simulations had TmCA as ligand and there were no Zn. Each simulation ran for 200 ns with 2 fs time steps. The MD trajectories were preprocessed using MDTraj package in Python. The dynamic couplings were analyzed using Bio3D package in R. Cartesian coordinates were used to calculate dynamic cross correlation (DCC) matrix for each simulation. The DCCs determined which residues had positively/negatively correlated motions. The formula to calculate the DCCs was

$$DCC ( i , j ) = \frac{ {〈 Δ {r}_{i} ( t ) \cdot Δ {r}_{j} ( t ) 〉}_{t}}{\sqrt{{〈 {‖ Δ {r}_{i} ( t ) ‖}^{2} 〉}_{t}} \sqrt{{〈 {‖ Δ {r}_{j} ( t ) ‖}^{2} 〉}_{t}}} ,$$

$$Δ {r}_{j} ( t ) = {r}_{i} ( t ) - {〈 {r}_{j} ( t ) 〉}_{t} :$$

[symbol]

· [symbol] ₜ means the time ensemble average.

[0566] It was hypothesized that increased DCCs in our selective mutants (main comparison was WT vs. ScF) are linked to improved selectivity, therefore, increasing those couplings to higher degrees would improve the selectivity. The designed mutations are shown in Table 2.

### Example 7

### Analysis to Increase Space in Binding Pocket for Methyl-Cytosine

[0567] Homologous sequences from multiple sequence alignments with insertions were identified. Analysis was limited to insertions that are present in more than X % of sequences; X could be any number. Two different designs where used: 1) X=20 (first set) and 2) X=5 (second set). The most probable signature for insertions in each set was calculated. Sequences with the most probable signatures were designed (Table 3).

### Example 8

### Protein Expression and Purification.

[0568] Constructs containing coding regions encoding ACDs with alterations predicted to increase 5mC selectivity are produced (Table 3 and 4). The substitutions mutations are present in a scaffold having Y130A/Y132H/D133W/R74L/T19Y/C171A/G₁₀₈C/G₁₈₈R/G₂₅K/S45W/117T/A59P/K60R/A6 1-68 (SEQ ID NO:75). Constructs are transformed in NEB BL21 (DE3), grown overnight on LB-kanamycin, at 37° C., and expressed in autoinduction media (terrific broth supplemented with kanamycin and 0.2% lactose) in a 96 deep well plate. Cells are incubated at 37° C. for 6 hours, with shaking, then at 20° C. overnight. The cell pellets are harvested by centrifugation, and then resuspended in BugBuster® Protein Extraction Reagent. The lysates are purified using Dynabeads® Ni-NTA and eluted in 50 mM Tris, 300 mM NaCl, 250 mM imidazole, 5% glycerol and 0.01% tween using a KingFisher (Thermofisher) automated instrument.

### Example 9

### Activity-Based Screen Using a Sequencing Assay.

[0569] Purified libraries are screened for activity using an NGS assay with a methylated ultramer substrate. Reactions containing 1 μL of enzyme and 50 nM methylated substrate are incubated for 1-4 h at 65° C. Reactions are stopped by incubation at 95° C. for 5 minutes. Two PCR steps for annealing are performed to add adapters followed by Illumina UD Indexes for sequencing. Indexed samples are pooled and purified using a 1.8X SPRI bead clean-up. The pool is denatured and diluted in Illumina Hyb Buffer 1 to a final concentration of 1 μM. A 30% spike-in of PhiX is added to the library prior to sequencing on an Illumina NextSeq 500.

### Example 10

### Mutant Cytosine Deaminase Dimers

[0570] Examples 10-13 describe the construction and testing of dimers, where the ACD portion of the dimers has the activity of deaminating 5mC at a greater rate than C. It is expected that dimers produced using ACDs having C-preferring activity will have similar characteristics as the dimers produced using 5mC-preferring ACDs but having 5hmC-preferring activity.

[0571] Dimerizing the mutant cytosine deaminase offers stability and speed of reaction, and do not compromise the 5mC selectivity to its monomeric counterpart (see FIG. 11). Deamination activity of several APOBEC variants were assessed using NGS-based deamination activity assay. The enzymes were incubated with 10 nM DNA ultramer of 126 nucleotides containing 17 C and 16 methylated C, in 10 μL reaction with 50 mM BisTris buffer, at 37° C. for various duration as described in Table 12, followed by one minute of heat inactivation at 95° C. The reactions were then subjected to dual-indexed PCR reaction using uracil tolerant Q5U Hot Start High-Fidelity DNA Polymerase (NEB, M0515). The amplified reactions were pooled together, paired-end sequencing run was performed on a NextSeq 500 system. To quantify the deamination activity, the positions of all unmodified or modified C in every sequencing read were assessed, base changes from C to T were assumed to have been deaminated.

[0572] Sequentially introducing mutations into APOBEC, including Y130A/Y132H/D133W on A3A, made the cytidine deaminase highly 5mC selective over unmodified C as shown in the selectivity curves (FIG. 11). The selectivity curves in FIG. 11 also shows the evolution towards 5mC selectivity of A3A mutants we have engineered. This alleviates the difficulties caused by sample degradation and offers better mapping quality by preserving DNA sequence complexity. However, the engineered enzyme became undesirably less stable with subsequent introduction of those abovementioned mutations. FIG. 11 and Table 12 also show that our engineered A3A dimer offer stability and speed, and do not have compromised 5mC selectivity to its monomeric counterpart.

TABLE 12
Various conditions for deamination by NEB APOBEC
and various 5 mC selective APOBEC mutants

| | | | Buffer pH |
|---|---|---|---|
| | | | (50 mM |
| | Protein amount | Time | Bis Tris) |
| NEB APOBEC | 0.01 or 0.001 μL / | 30 seconds | 6.5 |
| | 10 μL reaction | to 5 minutes | |
| Y130A | 12 nM or 125 nM | 7.5 to 120 | 6.5 |
| | | minutes | |
| Y130A/Y132H | 12 nM or 12 5 nM | 7.5 to 120 | 6.5 |
| | | minutes | |
| R74L/Y130A/ | 74 nM to 2000 nM | 2 to 16 hours | 7.0 |
| Y132H/D133W | | | |
| R74L/Y130A/ | 200 nM | 15 minutes | 7.0 |
| Y132H/D133W | | to 4 hours | |
| dimer | | | |

### Example 11

### Exemplary Design of Dimers

[0573] It was noted from experimental observation, APOBEC A3A can form dimer in solution although majority population of the A3A exist as monomer in solution. The reason monomer is the major population in vitro is not well understood. Therefore, we tested if expressing two A3A deaminases mutants joined by a linker would encourage dimer formation, and tested if the interactions made between the dimer-dimer interface would then afford stability to the engineered A3A.

[0574] FIG. 12 demonstrates one example of an architecture of engineered dimers, where two A3A deaminases are fused together by a flexible 32-amino acids linker, forming either homodimers or heterodimers. In this example, two homodimeric constructs, A3A (Y130A/Y132H/D133W) and A3A (R74L/Y130A/Y132H/D133W) and four heterodimeric constructs consist of A3A (Y130A/Y132H/D133W) and A3A (R74L/Y130A/Y132H/D133W) with catalytically inactive A3A (E72A) mutant on the C and N-terminals, were made by standard molecular methods.

### Example 12

### Deamination Activity of Dimers

[0575] Deamination activity of the homodimer and heterodimer altered enzymes described in Example 2 were evaluated in NGS-based quantitative deamination assay as described in Example 16, using a DNA ultramer of 126 nucleotides (containing 17 cytosines and 15 5mC interspersed) as substrate. Deamination activity of the enzymes (0.7 μM) were evaluated in NGS-based quantitative deamination assay at various reaction time (0, 15 min, 1 h, 2 h, 4h) and temperature (25, 37, 42 and 50° C.).

[0576] FIG. 13A shows that all six dimeric constructs have improved activity at higher reaction temperature compared to the monomer. The homodimer of R74L/Y130A/Y132H/D133W exhibits higher activity than the homodimer without R74L at 42° C. The introduction of a stability mutation such as R74L helps the dimer to perform deamination at higher temperatures. Additional stabilization mutations appear to have an additive effect on the stability of the dimer. Thus, homodimerization can be combined with other strategies for stabilization (including stabilizing mutations, stabilizing additives, etc.) in combination to create additive and increased stability. This stabilization effect may be applied to the other mutant APOBEC active site variants that have been engineered for selectivity on 5mC or other cytosine adducts such as 5hmC, etc. While all homodimers show an improvement in activity at higher temperatures, the homodimers with two active sites outperform the other four heterodimers which include a single catalytically active domain in terms of rate of reaction and activity at 42° C. Having the active deaminase at the N-terminus helps in the improvement in activity of the dimer. In addition, it was observed that the heterodimers when having catalytically dead A3A (E72A) at C-terminus were more active than those having a catalytically dead A3A (E72A) at the N-terminus.

[0577] FIG. 13B shows the relationship of C deamination and mC deamination by the A3A (R74L/Y130A/Y132H/D133W) monomer and the six dimers tested at abovementioned temperatures. Data points obtained from the various engineered dimers lie along the same curve as the monomer, indicating that fusing two A3A deaminases together did not impair their preference of deaminating 5mC over unmodified C. When we plotted the deamination data points of the engineered dimers at various temperatures (25° C., 37° C., 42° C. and 50° C.), 42° C. gave the best selectivity (see FIG. 13C). The elevated reaction temperature is favorable for a more unbiased 5mC to T conversion. It was thought that the 5mC is more accessible to the enzyme upon denaturation of DNA secondary structure. Activity at an elevated temperature is a favorable trait offered by the more stable dimer, which is absent in the less stable monomer. This data demonstrates that the dimer exhibited increased conversion and improved selectivity relative to the monomeric ACD.

[0578] One protein dimer includes of two deaminase domains. Notably, the same deamination efficiency could not be achieved by simply doubling the amount of monomer to match the number of deaminase domains of the dimer (FIG. 13D). For example, 0.4 μM of the monomer saturated at ~50% 5mC deamination after 2 hours of reaction at 42° C., while 0.2 μM of dimer deaminate 5mC to more than ~95% after 15 min at 42° C. This indicates that fusion of the two A3A deaminase domains together provides synergy and increases the enzyme stability and activity. Without wishing to be bound by theory, one model for this synergy is that the dimer binding affinity for the monomer in solution is weak, such that the protein concentration is far below the dissociation constant (K_{D}; unknown) of the dimer favoring a majority monomer population. Doubling of the protein concentration is not sufficient to shift this distribution. Fusion of two monomers into one homodimer enforces a high local protein concentration because the two monomers are now fixed together. In addition, preorganization of adjacent monomers by connection in one polypeptide chain reduces the number of possible conformations/orientations of monomers with respect to each other, reducing conformation entropy and favoring dimerization.

[0579] Next, we subjected the altered A3A (R74L/Y130A/Y132H/D133W) homodimer to further assessment on a mixed DNA substrate (a mix of human DNA (NA 12878) with 100% CpG methylated pUC19 and 0% methylated Lambda DNA). The mixed DNA substrate was sheared to 300 nucleotide fragments and a library was prepared using a ligation-based method. Like the ultramer-based deaminase activity assay, the A3A (R74L/Y130A/Y132H/D133W) homodimer exhibited improved stability at temperatures between 40° C.-50° C., whereas the activity of altered A3A (R74L/Y130A/Y132H/D133W) monomer declined rapidly at temperatures greater than 38° C. (FIG. 14A). The homodimer also outperformed the monomer on a DMSO-denatured DNA library, although its activity at higher temperatures was not as high when compared to NaOH-treated DNA.

[0580] Although zinc is required for A3A deamination activity at higher temperatures, it has been suggested that the ion may also mediate the dimerization and catalytic activity of A3A However, supplementing 10 μM zinc chloride salt to the reaction of A3A (R74L/Y130A/Y132H/D133W) monomer did not increase the reaction efficiency to the level of the homodimer (FIG. 14A). Thus, it appears that the dimer confers greater stability than what can be achieved by increasing the concentration of zinc.

[0581] The reaction efficiency of the homodimer and monomer A3As was measured with increasing concentrations of DNA. At high concentrations of DNA, the dimer exhibited consistently higher velocity (FIG. 15).

[0582] A highly selective 5mC engineered deaminase prefers to deaminate methylated pUC19 DNA substrate over non-methylated Lambda DNA substrate when both substrates are present in solution. Thus, to test and compare the selectivity of the deaminase, the altered deaminase was incubated with denatured methylated pUC19 and non-methylated Lambda DNA. The monomeric or homodimeric A3A (R74L/Y130A/Y132H/D133W) were incubated with denatured library prepped DNA containing mCpG methylated pUC19 and unmethylated lambda DNA. The library was denatured with 0.02 N NaOH for 10 minutes at 50° C., and or denatured with DMSO for10 minutes at 95° C.

[0583] To compare how reaction temperatures affect 5mC-selective conversion, 5mC to T conversion level in methylated DNA and C to U conversion level in non-methylated DNA were normalized to 1 by its maximum level (FIG. 14B). In DNA samples denatured with DMSO and NaOH, the monomer had similar reaction profiles on methylated and unmethylated DNA. resulted in differences in the reaction profiles between methylated and unmethylated DNA. Additionally, dimerization resulted in even greater differences between the reaction profiles of methylated and unmethylated DNA. In both the case of Zn added or dimerization, the methylated profile is stabilized at higher temperatures compared to the unmethylated profile. This enables the reaction to be run at higher temperatures where mC to T conversion is high and C to U conversion is low, providing a selectivity advantage under these conditions. In each case, the stability of a given construct and formulation can be quantified by Tmax (FIG. 14C). Here, Tmax (° C.) is defined as the temperature at which the enzyme has the highest level of 5mC or C deamination. Tmax is highest for homodimer in both NaOH and DMSO treated denatured DNA samples. This experiment reflects the stability of the dimer towards chemical denaturants.

[0584] This example demonstrated that connecting two A3A deaminases with a peptide linker remarkably increases the enzyme performance at higher temperature and in the presence of DNA denaturants, presumably by making the protein dimerization more efficient. Dimerization of any A3A deaminases constructs (wild type or engineered) improves its stability and activity, and this strategy is not limited to just abovementioned engineered A3A deaminases but is applicable to other altered deaminases provided.

### Example 13

### Additional Homodimer/Heterodimer Design

[0585] Additional heterodimers are designed with an inactive N-term monomer (bearing the E72A mutation or other inactivating mutations) connected to an active 5mC-selective altered deaminase as the C-term monomer as shown in Table 10. Additional heterodimers with the inverse configuration, having an inactive C-terminus and an active N-terminus as shown in Table 11 are also designed. The active 5mC-selective altered deaminase can be those disclosed herein, including the altered deaminase (Y130A/Y132H/D133W/R74L/T19Y/C171A/G₁₀₈C/G₁₈₈R/G₂₅K/S45W/117T/A59P/K60R/A6 1-68) as the monomer unit, indicated in the Tables 9-10 as “SEQ ID NO:75”. Other monomer scaffolds are also possible.

### Example 14

### Expression and Purification of Altered Cytidine Deaminases.

[0586] In this example, two altered cytidine deaminase dimers were recombinantly expressed and purified. Gel electrophoresis was used to confirm dimerization of the deaminases.

[0587] Two variants were produced, a first deaminase, referred to herein as the “D133 dimer variant” included the mutations T19Y/R74L/Y130A/Y132H/D133 and a second deaminase, referred to herein as the “D133V dimer variant” included the mutations T19Y/R74L/Y130A/Y132H/D133V, were produced. A nucleic acid construct encoding each variant was transfected into E. coli and the protein was recombinantly expressed in Terrific broth supplemented with 100 μg/ml Kanamycin, 2 mM magnesium sulphate, 0.2% lactose and 0.05% glucose. The polyhistidine tagged protein was purified using Ni-NTA agarose and desalted to storage buffer. The corresponding proteins were expressed in BL21 (DE3) cells, purified using Ni-NTA agarose beads, and desalted/concentrated using spin columns to storage buffer (50 mM Tris pH 7.5, 200 mM NaCl, 5% (v/v) glycerol, 0.01% (v/v) Tween-20, 0.5 mM DTT). This yielded mutant protein preparations with 80-85% purity, as judged by SDS-PAGE analysis.

[0588] Each purified protein was run on a denaturing SDS-PAGE gel. From this gel, the molecular weight of the most abundant band for each protein preparation was determined to be approximately 49 kDa (FIG. 16A). The concentration of each variant was determined using the band intensity relative to a standard curve of bovine serum albumin (BSA).

[0589] From this Example, it was determined that each of the D133W and D133W dimer variants expressed well in E. coli.

### Example 15

### Detection of 5mC Using the D133V Dimer Variant.

[0590] The following example was demonstrated using a synthetically produced 101 nucleotide single-stranded DNA oligonucleotide synthesized including 9 unmodified C, 9 5mC and 7 5hmC in various sequence contexts.

[0591] Oligonucleotides were synthesized on controlled pore glass (CPG) solid support with a 12-port MerMade automated DNA synthesizer (Bioautomation Corporation). Bz-dA/Ac-dC/ibu-dG/dT/5-Hydroxymethyl-dC II/Ac-5-Me-dC phosphoramidites were purchased from Glen Research. Reagents for the oligosynthesis were obtained from Tritech: Bio Grade Acetonitrile (AB1124-001), 3% TCA Deblock (DB3990-014), Activator Solution (AB3363-014), Cap A (CB3970-032) and Cap B (CB3979-032) and Oxidizer (OB9911-032).Oligonucleotides were purified by RPHPLC on Thermo Scientific™ DNAPac™ RP HPLC columns. All solvents used for solubility measurements were of HPLC grade and purchased from Sigma-Aldrich and dried by activated 3 Å molecular sieves or molecular trap packs. Routine concentrations of oligonucleotides analyzed absorbance on NanoDrop S1 spectrophotometer (Thermo Scientific). RNAse-free water was used for all experiments.

[0592] Oligonucleotide Synthesis. Phosphoramidites were coupled on solid universal unylinker support CPG resin 2000A (Chemgenes). Modified phosphoramidites used include 5-Hydroxymethyl-dC II and Ac-5-Me-dC (Glen Research). All modifiers and reagents were used as recommended by manufacturer. Syntheses was performed on 1 μmol scale on Mermade 12 DNA Synthesizer (Bioautomation Corporation) with final DMT off. Upon completion of solid supported synthesis. The CPG was rinsed with 3 mL of 10% diethylamine (DEA) in ACN for 2 minutes, followed by washing with ACN and air drying the CPG. Dried support was transferred to Eppendorf tubes and incubated in 1 mL of 0.4 M NaOH in MeOH/water 4:1 (v/v) at room temperature for 17 hours with rotation for solid support cleavage and nucleobase deprotection. The vial was briefly sonicated to break up the CPG and its supernatant was transferred to a clean vial. The CPG was rinsed with 250 μL of water and combine with the cleaved oligo. The solution was then further dilute to 10 mL with 100 mg/mL NaCl in water and loaded onto a prepped Glen-Pak DNA cartridge fitted with a 10 ml syringe. The purification continued beginning with the Salt Wash Step—i.e., the 2 mL rinse with 100 mg/mL NaCl containing 5% Acetonitrile (ACN) and thereafter followed up with standard protocols. The obtained 2 mL solution was concentrated on low temperature (4C) speed vacuum and purified by RP-HPLC twice. Product fractions were collected and lyophilized overnight to yield the oligonucleotides. Fractions were analyzed on 10% PAGE-Gel prior to analyze purity levels.

[0593] The D133W dimer variant was added to the sample to a final concentration of 100 nM in a total volume of 10 μL, containing 10 nM of DNA substrate in 50 mM BisTris buffer, pH7. The deamination reaction was incubated at 30° C., 32° C., 35° C., 40° C., 45° C., 50° C., 53° C. or 55° C. for 30 or 60 minutes, followed by 1 minute heat inactivation at 95° C.

[0594] The samples were subjected to PCR reaction to add Illumina adapters on both ends of the substrate using uracil tolerant Q5U Hot Start High-Fidelity DNA Polymerase (NEB, M0515). The substrates were further amplified by dual indexed primers that are unique to each sample. The amplified reactions were pooled together for paired-end sequencing on a NextSeq 500 system. FASTQ files were generated for every sample, whereas Python and R were utilized for data analysis and visualization. In order to quantify the deamination activity, the positions of all unmodified or modified C in every sequencing read were assessed, base changes from C to T were assumed to have been deaminated by the D133W dimer variant.

[0595] It was observed that the D133W dimer variant exhibited activity primarily on 5mC, with very low deamination of unmodified C and 5hmC at all temperatures and incubation times (FIG. 16B). The D133W dimer variant exhibited maximal activity on 5mc at approximately 45° C. and had reached maximal reaction efficiency after approximately 30 minutes. (FIG. 16B, 17C). In addition, it was observed that the D133W dimer variant exhibited preferential activity for 5mC over both unmodified C and 5hmC (FIG. 17A, 17B, and 17D).

### Example 16

### Detection of 5mC and 5hmC Using the D133V Dimer Variant.

[0596] The same experiment as described in Example 15 but using the D133V dimer variant rather than the D133W dimer variant. The treated DNA was purified, sequenced, and analyzed as described in Example 15.

[0597] It was observed that the D133V dimer variant exhibited activity on both 5mC and 5hmC, with very low activity on unmodified C. (FIG. 16B). The D133V dimer variant exhibited a slight preference for 5mC (FIG. 16B, FIG. 17D). The D133V dimer variant exhibited maximal activity on both 5mC and 5hmC at approximately 45° C. and had reached maximal reaction efficiency after approximately 30 minutes. (FIG. 16B, 17C). In addition, it was observed that the D133W dimer variant exhibited preferential activity for 5mC over both unmodified C and 5hmC (FIG. 17A, B, and D).

### Example 17

[0598] Detection of 5hmC by comparing results of sequencing gDNA treated with a D133W dimer variant and results of sequencing gDNA treated with a D133V dimer variant.

[0599] The results of Examples 15 and 16 were compared, and it was determined that 5hmC and 5mC could be detected in one sample using the two dimer variants in parallel. DNA samples with unknown methylation profile are treated with D133W and D133V dimer variant separately. Positions with C to T base changes detected in both treatments can be identified as 5mC, whereas cytosine positions that were read as T only in D133V-treated samples but not D133W can be reported as 5hmC. DNA samples with unknown methylation profile are treated with D133W and D133V dimer variant separately. Positions with C to T base changes detected in both treatment could be identified as 5mC, whereas cytosine positions that were read as T only in D133V-treated samples but not D133W could be reported as 5hmC.

[0600] Use of APOBEC3A (T19Y/R74L/Y130A/Y132H/D133V) dimer and APOBEC3A (T19Y/R74L/Y130A/Y132H/D133W) dimer for 5hmC single-base resolution mapping.

[0601] Fully enzymatic, non-destructive 5hmC mapping at single-base resolution with the conservation of the complexity of 4-base genome could be perform by leveraging on the stark difference in the deamination characteristics between D133W variant and D133V variant. The former highly prefers to deaminate 5mC only, while the latter highly prefers to deaminate both 5mC and 5hmC almost equally. In addition, both engineered APOBEC3A variants are highly discriminatory against C, which is advantageous as we only need to look at the binary between 5mC and 5hmC.

[0602] To elucidate the status 5hmC in a genomic DNA sample, we will split the sample into two equal portions (FIG. 18). One portion will be treated with D133W variant, which will result in the deamination of 5mC to T. On the other hand, the other portion will be treated with D133V variant, which will result in the deamination of 5mC to T and 5hmC to 5hmU (5hmU is read out as T on the sequencer). We can then perform library prep and assign UMI to each sample to facilitate identification by NGS and bioinformatics analysis.

### Sequence Analysis

[0603] Sequencing reads from D133V variant-treated DNA sample are aligned to reference genome. By quantifying C to T substitution, we the total level of 5mC and 5hmC in the sample is determined.

[0604] The D133W variant-treated samples are analyzed in the same way, whereby only positions containing 5mC will be converted to T.

[0605] By comparing methylation levels from above two treatment groups, both 5mC and 5hmC positions in the DNA sample are detected.

### Example 18

### Methods for Locus-Specific 5mC and 5hmC Detection for In Vitro Diagnostic (IVD)

[0606] The enzymatic deamination of 5mC and 5hmC is broadly applicable to various IVD approaches to profile 5mC and 5hmC status in a locus-specific manner (FIG. 19). While we only provide an example here, the similar principle that uses readout upon hybridization of specifically designed oligonucleotides probes onto defined genomic regions upon APOBEC deamination of modified C to modified U or T can be applicable for IVD.

[0607] One example would be fluorescence in situ hybridization (FISH) for 5mC and 5hmC detection in single cells or tissues. We can readout the epigenetic status (C, 5mC and 5hmC) of defined locus in the genome of fixed cells or tissues by sequentially incubating D133W variant and then D133V variant. The steps are as described:

[0608] Deamination of genome of fixed cells or tissues by incubation of D133W variant. C and 5hmC will not be deaminated but 5mC will convert to T.

[0609] Add fluorescence probes that target both differentially methylated and hydroxymethylated loci. In the example given in FIG. 19, fluorescence probe tagged with a first marker, such as DAPI (blue), anneal to non-deaminated locus of interest, while fluorescence probe tagged with a second marker, such as FAM (green), will anneal to a locus of interest. Excess fluorescence probes are washed away, and the samples imaged.

[0610] Annealed fluorescence probes are then washed away. Deamination of genome of fixed cells or tissues by incubation of D133V variant. C will not be deaminated but 5hmC will convert to 5hmU, read out as T. Step 2 is repeated.

[0611] Epigenetic status of locus of interest can then be deciphered by the sequential readout of the colors. If blue (the first marker) is read out twice at the locus of interest, there is no epigenetic modification. If green (the second marker) is read out twice, the epigenetic modification at the locus of interest is 5mC. If blue is first read out followed by green, the epigenetic modification at the locus of interest is 5hmC.

### Example 19

### Deamination Activities of Altered Cytidine Deaminases on C, 5mC, and 5hmC

[0612] Deamination activity of altered enzymes was evaluated in a NGS-based quantitative deamination assay as described in Example 6, using a DNA oligonucleotide of 101-nucleotides (containing nine cytosine, nine 5mC, and seven 5hmC in various sequence contexts) as substrate (FIG. 20). Enzymes were incubated with the 101-mer substrate and subjected to sequencing. A 5hmC-specific APOBEC will convert all the 5hmC to 5hmU (which is identified as T upon sequencing) and other modified and unmodified cytosines remain as C. By aligning sequencing reads to the known 101-mer substrate DNA sequence, positions with C to T conversion indicate specific 5hmC deamination by altered cytosine deaminases. Deamination activity of the enzymes (0.05 or 0.4 μM) was evaluated in the NGS-based quantitative deamination assay for 30 mins, 1 hour, 2 hours or 4 hours and a temperature of 37 or 42 degrees C.).

[0613] Altered cytidine deaminases were produced by combinatorial mutagenesis at Y130 and D133 positions in APOBEC3A in the presence of a Y132H mutation and seven other stability enhancing mutations in the ScF background (R74L, T19Y, C171A, G108A, G188R, G25K and S45W) (FIG. 21A-1, FIG. 21A-2). Interestingly, although Y130D/D133X mutants showed reduced activity in general, when the y-axis was expanded, Y130D/Y132H mutants with A, G, S, and T amino acids at position 133 show certain preference on deaminating 5hmC over C and 5mC (FIG. 21B).

[0614] A subset of 12 APOBEC Y130D mutants were repurified and tested in combinations with Y132X (where X is H, R, or K) and D133Z (where Z is A, G, S, or T). H, R, and K were selected for substitutions at Y132 as they were previously shown to enhance substrate preference of altered cytidine deaminases for 5mC or C. Here the APOBEC mutants are labelled as 3-letters which represent the amino acids at 130, 132 and 133 positions, respectively. For example, Y130D/Y132H/D133G is abbreviated to DHG. An additional example, Y130D/Y132H/D133S is abbreviated to DHS. Other than DHG, DHS and DRA mutants that failed to express (FIG. 22A) using automated KingFisher instrument, all the other mutants deaminated more 5hmC than C and 5mC combined (FIG. 22B). In contrast, our engineered 5mC-selective APOBEC mutant had minimal 5hmC deamination activity (FIG. 22C).

[0615] Five purer protein preparations were obtained by Ni-NTA-purification and desalting (FIG. 23A) to repeat and confirm the 5hmC preferring activities. The five proteins were the ones described in FIG. 22 having the DHA, DHT, DKS, DKT, or DRS substitution mutations at 130/132/133). For this experiment, Y130A/Y132H/D133V (AHV) was included as an altered cytidine deaminase that could deaminate both 5mC and 5hmC almost equally. Also included were various experimental conditions that allowed us to draw the selectivity curves for respective proteins (FIG. 23B). To recall, detection of 5hmC by using AHV required simultaneous treatment of DNA sample with AHW follow by subtractive analysis; however, this will not be necessary by using a 5hmC-specific cytidine deaminase. The mutants achieved ~75% of 5hmC conversion while 5mC and C are only ~25% converted, after incubation for 4 hours at 37° C. or 42° C., in the presence of 5-fold excess ZnCl2 (FIG. 23C-D).

### Example 20

[0616] Carboxymethylation of a DNA substrate with a cytosine-specific methyltransferase (cMTx) and subsequent deamination of the substrate with wild-type APOBEC3A.

[0617] Treatment of DNA with a cMTx prior to treatment with a cytosine deaminase, such as APOBEC3A, may protect each unmodified C from deamination with the cytosine deaminase. A first sample of a synthetic DNA substrate including C and 5 mC is treated with a wild-type cytidine deaminase. A second sample of the synthetic DNA substrate is treated with a cMTx and carboxy-SAM for at least one hour. The second sample is then treated with a wild-type cytidine deaminase. Each sample is prepared for sequencing and analyzed using NGS techniques.

[0618] Each unmodified C in the sample not treated with the cMTx is interpreted as “T” in the sequencing results. Each 5mC in the sample not treated with cMTx is also interpreted as “T” in the sequencing results. Each originally unmodified C in the sample treated with the cMTx is interpreted as “C” in the sequencing results. Each 5mC in the sample treated with the cMTx is interpreted as “T” in the sequencing results.

[0619] From these results, it is determined that the cMTx added a carboxymethyl group to each unmodified C in the original sample. It is determined that the cytosine deaminase is not able to deaminate C after the addition of the carboxymethyl group.

[0620] Analysis of the sequencing results from the sample not treated with the cMTx yields false positives, or interpretation of unmodified C as being 5mC. Analysis of the sequencing results from the sample treated with cMTx yields a lower rate of false positives. Thus, identification of the 5mC residues in the sample treated with the cMTx is more reliable.

### Example 21

[0621] Carboxymethylation and deamination of a synthetic DNA substrate with an ACD having 5mC-selective activity (also referred to herein as “C-defective” activity) and an ACD having 5mC- and 5hmC-preferring activity.

[0622] A synthetic DNA sample including unmodified C, 5mC, and 5hmC is treated with cMTx and carboxy-SAM. The treated sample is divided into two groups. The first group is treated with a 5mC-selective ACD that has very little activity toward 5hmC. The second group is treated with a 5mC- and 5hmC-preferring ACD that deaminates both 5mC and 5hmC but has reduced activity toward unmodified C. The first group and the second group are prepared for sequencing and analyzed using a NGS workflow.

[0623] In the group treated with the 5mC-selective ACD, each originally unmodified C is interpreted as “C,” each 5mC is interpreted as “T,” and each 5hmC is interpreted as “C.” In the group treated with the ACD having 5mC- and 5hmC-preferring activity, each originally unmodified C is interpreted as “C,” each 5mC is interpreted as “T,” and each 5hmC is interpreted as “T.” By comparing the results of the two sequencing analyses, it can be determined which residues were unmodified C in the original sample, because they were interpreted as “C” in both sequencing analyses. It is determined which residues were 5mC in the original sample, because they were interpreted as “T” in both sequencing analyses. Importantly, it can also be determined which residues were 5hmC in the original sample, because they were interpreted as “C” in the first group and interpreted as “T” in the second group. In this way, the identity of C, 5mC, and 5hmC in the original sample can be identified.

[0624] The complete disclosure of all patents, patent applications, and publications, and electronically available material (including, for instance, nucleotide sequence submissions in, e.g., GenBank and RefSeq, and amino acid sequence submissions in, e.g., SwissProt, PIR, PRF, PDB, and translations from annotated coding regions in GenBank and RefSeq) cited herein are incorporated by reference in their entirety. Supplementary materials referenced in publications (such as supplementary tables, supplementary figures, supplementary materials and methods, and/or supplementary experimental data) are likewise incorporated by reference in their entirety. In the event that any inconsistency exists between the disclosure of the present application and the disclosure(s) of any document incorporated herein by reference, the disclosure of the present application shall govern. The foregoing detailed description and examples have been given for clarity of understanding only. No unnecessary limitations are to be understood therefrom. The disclosure is not limited to the exact details shown and described, for variations obvious to one skilled in the art will be included within the disclosure defined by the claims.

[0625] Unless otherwise indicated, all numbers expressing quantities of components, molecular weights, and so forth used in the specification and claims are to be understood as being modified in all instances by the term “about.” Accordingly, unless otherwise indicated to the contrary, the numerical parameters set forth in the specification and claims are approximations that may vary depending upon the desired properties sought to be obtained by the present disclosure. At the very least, and not as an attempt to limit the doctrine of equivalents to the scope of the claims, each numerical parameter should at least be construed in light of the number of reported significant digits and by applying ordinary rounding techniques.

[0626] Notwithstanding that the numerical ranges and parameters setting forth the broad scope of the disclosure are approximations, the numerical values set forth in the specific examples are reported as precisely as possible. All numerical values, however, inherently contain a range necessarily resulting from the standard deviation found in their respective testing measurements.

[0627] All headings are for the convenience of the reader and should not be used to limit the meaning of the text that follows the heading, unless so specified.

The application's sequence listing, which the Patent Office published only in electronic form, follows.

SEQUENCE LISTING (1241 sequences)

SEQ ID NO: 1 - protein, 198 aa, Homo sapiens [sequence omitted]

SEQ ID NO: 2 - protein, 236 aa, Homo sapiens
MTSEKGPSTGDPTLRRRIEPWEFDVFYDPRELRKEACLLYEIKWGMSRKIWRSSGKNTTNHVEVNFIKKFTSERDFHPSMSCSITWFLSWSPCWECSQAIREFLSRHPGVTLVIYVARLFWHMDQQNRQGLRDLVNSGVTIQIMRASEYYHCWRNFVNYPPGDEAHWPQYPPLWMMLYALELHCIILSLPPCLKISRRWQNHLTFFRLHLQNCHYQTIPPHILLATGLIHPSVAWR

SEQ ID NO: 3 - protein, 199 aa, Homo sapiens
MEASPASGPRHLMDPHIFTSNFNNGIGRHKTYLCYEVERLDNGTSVKMDQHRGFLHNQAKNLLCGFYGRHAELRFLDLVPSLQLDPAQIYRVTWFISWSPCFSWGCAGEVRAFLQENTHVRLRIFAARIYDYDPLYKEALQMLRDAGAQVSIMTYDEFKHCWDTFVDHQGCPFQPWDGLDEHSQALSGRLRAILQNQGN

SEQ ID NO: 4 - protein, 224 aa, Homo sapiens
MAQKEEAAVATEAASQNGEDLENLDDPEKLKELIELPPFEIVTGERLPANFFKFQFRNVEYSSGRNKTFLCYVVEAQGKGGQVQASRGYLEDEHAAAHAEEAFFNTILPAFDPALRYNVTWYVSSSPCAACADRIIKTLSKTKNLRLLILVGRLFMWEEPEIQAALKKLKEAGCKLRIMKPQDFEYVWQNFVEQEEGESKAFQPWEDIQENFLYYEEKLADILK

SEQ ID NO: 5 - protein, 382 aa, Homo sapiens
MNPQIRNPMERMYRDTFYDNFENEPILYGRSYTWLCYEVKIKRGRSNLLWDTGVFRGQVYFKPQYHAEMCFLSWFCGNQLPAYKCFQITWFVSWTPCPDCVAKLAEFLSEHPNVTLTISAARLYYYWERDYRRALCRLSQAGARVTIMDYEEFAYCWENFVYNEGQQFMPWYKFDENYAFLHRTLKEILRYLMDPDTFTFNFNNDPLVLRRRQTYLCYEVERLDNGTWVLMDQHMGFLCNEAKNLLCGFYGRHAELRFLDLVPSLQLDPAQIYRVTWFISWSPCFSWGCAGEVRAFLQENTHVRLRIFAARIYDYDPLYKEALQMLRDAGAQVSIMTYDEFEYCWDTFVYRQGCPFQPWDGLEEHSQALSGRLRAILQNQGN

SEQ ID NO: 6 - protein, 190 aa, Homo sapiens
MNPQIRNPMKAMYPGTFYFQFKNLWEANDRNETWLCFTVEGIKRRSVVSWKTGVFRNQVDSETHCHAERCFLSWFCDDILSPNTKYQVTWYTSWSPCPDCAGEVAEFLARHSNVNLTIFTARLYYFQYPCYQEGLRSLSQEGVAVEIMDYEDFKYCWENFVYNDNEPFKPWKGLKTNFRLLKRRLRESLQ

SEQ ID NO: 7 - protein, 386 aa, Homo sapiens
MNPQIRNPMERMYRDTFYDNFENEPILYGRSYTWLCYEVKIKRGRSNLLWDTGVFRGPVLPKRQSNHRQEVYFRFENHAEMCFLSWFCGNRLPANRRFQITWFVSWNPCLPCVVKVTKFLAEHPNVTLTISAARLYYYRDRDWRWVLLRLHKAGARVKIMDYEDFAYCWENFVCNEGQPFMPWYKFDDNYASLHRTLKEILRNPMEAMYPHIFYFHFKNLLKACGRNESWLCFTMEVTKHHSAVFRKRGVFRNQVDPETHCHAERCFLSWFCDDILSPNTNYEVTWYTSWSPCPECAGEVAEFLARHSNVNLTIFTARLCYFWDTDYQEGLCSLSQEGASVKIMGYKDFVSCWKNFVYSDDEPFKPWKGLQTNFRLLKRRLREILQ

SEQ ID NO: 8 - protein, 373 aa, Homo sapiens
MKPHFRNTVERMYRDTFSYNFYNRPILSRRNTVWLCYEVKTKGPSRPRLDAKIFRGQVYSQPEHHAEMCFLSWFCGNQLPAYKCFQITWFVSWTPCPDCVAKLAEFLAEHPNVTLTISAARLYYYWERDYRRALCRLSQAGARVKIMDDEEFAYCWENFVYSEGQPFMPWYKFDDNYAFLHRTLKEILRNPMEAMYPHIFYFHFKNLRKAYGRNESWLCFTMEVVKHHSPVSWKRGVFRNQVDPETHCHAERCFLSWFCDDILSPNTNYEVTWYTSWSPCPECAGEVAEFLARHSNVNLTIFTARLYYFWDTDYQEGLRSLSQEGASVEIMGYKDFKYCWENFVYNDDEPFKPWKGLKYNFLFLDSKLQEILE

SEQ ID NO: 9 - protein, 384 aa, Homo sapiens
MKPHFRNTVERMYRDTFSYNFYNRPILSRRNTVWLCYEVKTKGPSRPPLDAKIFRGQVYSELKYHPEMRFFHWFSKWRKLHRDQEYEVTWYISWSPCTKCTRDMATFLAEDPKVTLTIFVARLYYFWDPDYQEALRSLCQKRDGPRATMKIMNYDEFQHCWSKFVYSQRELFEPWNNLPKYYILLHIMLGEILRHSMDPPTFTFNFNNEPWVRGRHETYLCYEVERMHNDTWVLLNQRRGFLCNQAPHKHGFLEGRHAELCFLDVIPFWKLDLDQDYRVTCFTSWSPCFSCAQEMAKFISKNKHVSLCIFTARIYDDQGRCQEGLRTLAEAGAKISIMTYSEFKHCWDTFVDHQGCPFQPWDGLDEHSQDLSGRLRAILQNQEN

SEQ ID NO: 10 - protein, 200 aa, Homo sapiens
MALLTAETFRLQFNNKRRLRRPYYPRKALLCYQLTPQNGSTPTRGYFENKKKCHAEICFINEIKSMGLDETQCYQVTCYLTWSPCSSCAWELVDFIKAHDHLNLGIFASRLYYHWCKPQQKGLRLLCGSQVPVEVMGFPEFADCWENFVDHEKPLSFNPYKMLEELDKNSRAIKRRLERIKIPGVRAQGRYMDILCDAEV

SEQ ID NO: 11 - protein, 367 aa, Homo sapiens
MEPIYEEYLANHGTIVKPYYWLSFSLDCSNCPYHIRTGEEARVSLTEFCQIFGFPYGTTFPQTKHLTFYELKTSSGSLVQKGHASSCTGNYIHPESMLFEMNGYLDSAIYNNDSIRHIILYSNNSPCNEANHCCISKMYNFLITYPGITLSIYFSQLYHTEMDFPASAWNREALRSLASLWPRVVLSPISGGIWHSVLHSFISGVSGSHVFQPILTGRALADRHNAYEINAITGVKPYFTDVLLQTKRNPNTKAQEALESYPLNNAFPGQFFQMPSGQLQPNLPPDLRAPVVFVLVPLRDLPPMHMGQNPNKPRNIVRHLNMPQMSFQETKDLGRLPTGRSVEIVEITEQFASSKEADEKKKKKGKK

SEQ ID NO: 12 - protein, 38 aa, synthetic construct
  VARIANT 2: note = P, A, or V
  VARIANT 4..31: note = X can be any amino acid.
  SITE 4..31: note = This region can encompass 23-28 residues
  VARIANT 34..37: note = X can be any amino acid
  SITE 34..37: note = This region can encompass 2-4 residues
HXEXXXXXXXXXXXXXXXXXXXXXXXXXXXXPCXXXXC

SEQ ID NO: 13 - protein, 87 aa, synthetic construct
  VARIANT 2: note = X can be any amino acid
  VARIANT 4..27: note = X can be any amino acid
  VARIANT 30: note = S or T
  SITE 33..36: note = This region can encompass 2-4 residues
  VARIANT 45..52: note = X can be any amino acid
  VARIANT 33..36: note = X can be any amino acid
  SITE 33..36: note = This region can encompass 2-4 residues
  VARIANT 54..58: note = X can be any amino acid
  VARIANT 60: note = L or I
  VARIANT 62..72: note = X can be any amino acid
  SITE 62..72: note = This region can encompass 8-11 residues
  VARIANT 74..75: note = X can be any amino acid
  VARIANT 77..86: note = X can be any amino acid
  VARIANT 38..43: note = X can be any amino acid
HXEXXXXXXXXXXXXXXXXXXXXXXXXSWXPCXXXXCXXXXXXFXXXXXXXXLXXXXXRXYXXXXXXXXXXXLXXLXXXXXXXXXXM

SEQ ID NO: 14 - protein, 199 aa, synthetic construct
  VARIANT 1..26: note = X can be any amino acid
  SITE 1..26: note = This region can encompass 16-26 residues
  VARIANT 29..30: note = X can be any amino acid
  VARIANT 32: note = X can be any amino acid
  VARIANT 36: note = X can be any amino acid
  VARIANT 38..52: note = X can be any amino acid
  VARIANT 54..56: note = X can be any amino acid
  VARIANT 58..69: note = X can be any amino acid
  VARIANT 73..74: note = X can be any amino acid
  VARIANT 76..89: note = X can be any amino acid
  VARIANT 91..92: note = X can be any amino acid
  VARIANT 95..96: note = X can be any amino acid
  VARIANT 102..105: note = X can be any amino acid
  SITE 102..105: note = This region can encompass 2-4 residues
  VARIANT 108..112: note = X can be any amino acid
  VARIANT 115..121: note = X can be any amino acid
  VARIANT 123: note = X can be any amino acid
  VARIANT 125..127: note = X can be any amino acid
  VARIANT 129: note = L or I
  VARIANT 141..142: note = X can be any amino acid
  VARIANT 131..138: note = X can be any amino acid
  VARIANT 144..146: note = X can be any amino acid
  VARIANT 148..152: note = X can be any amino acid
  VARIANT 154..157: note = X can be any amino acid
  VARIANT 159..160: note = X can be any amino acid
  VARIANT 163..164: note = X can be any amino acid
  VARIANT 167..172: note = X can be any amino acid
  VARIANT 174: note = X can be any amino acid
  VARIANT 177..189: note = X can be any amino acid
  VARIANT 191..192: note = X can be any amino acid
  VARIANT 194..199: note = X can be any amino acid
  SITE 194..199: note = This region can encompass 2-6 residues
XXXXXXXXXXXXXXXXXXXXXXXXXXGRXXTXLCYXVXXXXXXXXXXXXXXXGXXXNXXXXXXXXXXXXHAEXXFXXXXXXXXXXXXXXYXXTWXXSWSPCXXXXCAXXXXXFLXXXXXXXLXIXXXRXYXXXXXXXXGLXXLXXXGXXXXXMXXXXFXXCWXXFVXXXXXXFXPWXXXXXXXXXXXXXLXXIXXXXXX

SEQ ID NO: 15 - protein, 199 aa, synthetic construct
  VARIANT 1..26: note = X can be any amino acid
  VARIANT 29..30: note = X can be any amino acid
  VARIANT 32: note = X can be any amino acid
  VARIANT 36: note = X can be any amino acid
  VARIANT 38..52: note = X can be any amino acid
  VARIANT 54..69: note = X can be any amino acid
  VARIANT 73..74: note = X can be any amino acid
  VARIANT 76..89: note = X can be any amino acid
  VARIANT 91..92: note = X can be any amino acid
  VARIANT 95..96: note = X can be any amino acid
  VARIANT 102..105: note = X can be any amino acid
  VARIANT 108..112: note = X can be any amino acid
  VARIANT 115..121: note = X can be any amino acid
  VARIANT 123: note = X can be any amino acid
  VARIANT 126..127: note = X can be any amino acid
  VARIANT 129: note = L or I
  VARIANT 131..138: note = X can be any amino acid
  VARIANT 141..142: note = X can be any amino acid
  VARIANT 144..146: note = X can be any amino acid
  VARIANT 148..152: note = X can be any amino acid
  VARIANT 154..157: note = X can be any amino acid
  VARIANT 159..160: note = X can be any amino acid
  VARIANT 163..164: note = X can be any amino acid
  VARIANT 167..172: note = X can be any amino acid
  VARIANT 174: note = X can be any amino acid
  VARIANT 177..189: note = X can be any amino acid
  VARIANT 194..199: note = X can be any amino acid
  VARIANT 191..192: note = X can be any amino acid
XXXXXXXXXXXXXXXXXXXXXXXXXXGRXXTXLCYXVXXXXXXXXXXXXXXXGXXXXXXXXXXXXXXXXHAEXXFXXXXXXXXXXXXXXYXXTWXXSWSPCXXXXCAXXXXXFLXXXXXXXLXIFXXRXYXXXXXXXXGLXXLXXXGXXXXXMXXXXFXXCWXXFVXXXXXXFXPWXXXXXXXXXXXXXLXXIXXXXXX

SEQ ID NO: 16 - protein, 199 aa, synthetic construct
MEASPASGPRHLMDPHIFTSNFNNGIGRHKTYLCYEVERLDNGTSVKMDQHRGFLHNQAKNLLCGFYGRHAELRFLDLVPSLQLDPAQIYRVTWFISWSPCFSWGCAGEVRAFLQENTHVRLRIFAARIADYDPLYKEALQMLRDAGAQVSIMTYDEFKHCWDTFVDHQGCPFQPWDGLDEHSQALSGRLRAILQNQGN

SEQ ID NO: 17 - protein, 199 aa, synthetic construct
MEASPASGPRHLMDPHIFTSNFNNGIGRHKTYLCYEVERLDNGTSVKMDQHRGFLHNQAKNLLCGFYGRHAELRFLDLVPSLQLDPAQIYRVTWFISWSPCFSWGCAGEVRAFLQENTHVRLRIFAARIADHDPLYKEALQMLRDAGAQVSIMTYDEFKHCWDTFVDHQGCPFQPWDGLDEHSQALSGRLRAILQNQGN

SEQ ID NO: 18 - protein, 199 aa, synthetic construct
MEASPASGPRHLMDPHIFTSNFNNGIGRHKTYLCYEVERLDNGTSVKMDQHRGFLHNQAKNLLCGFYGRHAELRFLDLVPSLQLDPAQIYRVTWFISWSPCFSWGCAGEVRAFLQENTHVRLRIFAARILDYDPLYKEALQMLRDAGAQVSIMTYDEFKHCWDTFVDHQGCPFQPWDGLDEHSQALSGRLRAILQNQGN

SEQ ID NO: 19 - protein, 202 aa, Macaca fascicularis
MDGSPASRPRHLMDPNTFTFNFNNDLSVRGRHQTYLCYEVERLDNGTWVPMDERRGFLHNKAKNVPCGDYGCHVELRFLCEVPSWQLDPAQTYRVTWFISWSPCFRKGCAGQVRAFLQENKHVRLRIFAARIYDYDPRYQEALRTLRDAGAQVSIMTYEEFKHCWDTFVDRQGRPFQPWDGLDEHSQALSGRLRAILQNQGN

SEQ ID NO: 20 - protein, 199 aa, Pongo pygmaeus
MEASPASGPRHLMDPCVFTSNFNNGIRWHKTYLCYEVERLDNGTWVKMDQHRGFLHNQARNPLYGLDGRHAELRFLGLLPYWQLDPAQIYRVTWFISWSPCFSWGCARQVRAFLQENTHVRLRIFAARIYDYDPLYKEALQMLRDAGAQVSIMTYDEFEYCWNTFVDHQGCPFQPWDGLEEHSQALSGKLQAILLNQGN

SEQ ID NO: 21 - protein, 199 aa, Nomascus leucogenys
MEASPASRPGHLMDPQVFTSNFNNGIRWHKTYLCYEVERLDNGTWVKMDQHRGFLHNQAKNLFCGFYGRHAELCFLDLVPSLQLDPAQTYRVTWFISWSPCFSWGCAEQVRAFLQENTHVRLRLFAARIYDYDPLYKEALQMLRGAGAQVSIMTYHEFKHCWDTFVDHQGRPFQPWDGLEEHSQALSGRLQAILQNQGN

SEQ ID NO: 22 - protein, 199 aa, Pan troglodytes
TEASPASGPRHLMDPHIFTSNFNNGIGRRKTYLCYEVERLDNGTSVKMDQHRGFLHNQAKNLLCGFYGRHAELCFLDLVPSLQLDPAQIYRVTWFISWSPCFSWGCAGQVRAFLQENTHVRLRIFAARIYDYDPLYKEALQMLRDAGAQVSIMTYDEFKHCWDTFVDHQGCPFQPWDGLEEHSQALSGRLRAILQNQGN

SEQ ID NO: 23 - protein, 199 aa, Gorilla gorilla
VEASPASGPRHLMDPHIFTSNFNNVIGRHKTYLCYEVERLDNGTWVKMDQHRGFLHNQAKNLLCGFYGRHAELRFLDLVPSLQLDPAQIYRVTWFISWSPCFSWGCAGQVRAFLQENTHVRLHIFAARIYDYDPLYKEALQMLRDAGAQVSIMTYDEFKHCWDTFVDHQGCPFQPWDGLEEHSQALSGRLRAILQNQGN

SEQ ID NO: 24 - DNA, 48 bp, synthetic construct
  source 1..48: mol_type = other DNA
  modified_base 7: mod_base = m5c
  modified_base 12: mod_base = OTHER; note = 5-hydroxymethylcytosine
  modified_base 18: mod_base = m5c
  modified_base 33: mod_base = OTHER; note = 5-hydroxymethylcytosine
  modified_base 41: mod_base = m5c
  modified_base 48: mod_base = OTHER; note = 5-hydroxymethylcytosine
aaggtccgtcacgcagacgacggacagcgagaccactgaccgatcaac

SEQ ID NO: 25 - DNA, 48 bp, synthetic construct
  source 1..48: mol_type = other DNA
  modified_base 6: mod_base = OTHER; note = deoxyuracil
  modified_base 10: mod_base = OTHER; note = deoxyuracil
  modified_base 12: mod_base = OTHER; note = Hydroxymethyldeoxyuridine
  modified_base 14: mod_base = OTHER; note = deoxyuracil
  modified_base 21: mod_base = OTHER; note = deoxyuracil
  modified_base 25: mod_base = OTHER; note = deoxyuracil
  modified_base 28: mod_base = OTHER; note = deoxyuracil
  modified_base 33: mod_base = OTHER; note = Hydroxymethyldeoxyuridine
  modified_base 34: mod_base = OTHER; note = deoxyracil
  modified_base 36: mod_base = OTHER; note = deoxyuracil
  modified_base 40: mod_base = OTHER; note = deoxyuracil
  modified_base 45: mod_base = OTHER; note = deoxyuracil
  modified_base 48: mod_base = OTHER; note = Hydroxymethyldeoxyuridine
aaggtttgttatgtagatgatggatagtgagattattgattgattaat

SEQ ID NO: 26 - DNA, 48 bp, synthetic construct
  source 1..48: mol_type = other DNA
  modified_base 12: mod_base = OTHER; note = 5-hydroxymethylcytosine
  modified_base 33: mod_base = OTHER; note = 5-hydroxymethylcytosine
  modified_base 45: mod_base = OTHER; note = 5-hydroxymethylcytosine
aaggtctgtcacgcagatgacggacagcgagaccactgactgatcaac

SEQ ID NO: 27 - DNA, 48 bp, synthetic construct
  source 1..48: mol_type = other DNA
  modified_base 6: mod_base = OTHER; note = deoxyuracil
  modified_base 7: mod_base = m5c
  modified_base 18: mod_base = m5c
  modified_base 41: mod_base = m5c
  modified_base 14: mod_base = OTHER; note = deoxyuracil
  modified_base 10: mod_base = OTHER; note = deoxyuracil
  modified_base 21: mod_base = OTHER; note = deoxyuracil
  modified_base 25: mod_base = OTHER; note = deoxyuracil
  modified_base 28: mod_base = OTHER; note = deoxyuracil
  modified_base 34: mod_base = OTHER; note = deoxyuracil
  modified_base 36: mod_base = OTHER; note = deoxyuracil
  modified_base 40: mod_base = OTHER; note = deoxyuracil
  modified_base 45: mod_base = OTHER; note = deoxyuracil
  modified_base 12: mod_base = OTHER; note = 5-hydroxymethylcytosine
  modified_base 33: mod_base = OTHER; note = 5-hydroxymethylcytosine
  modified_base 48: mod_base = OTHER; note = 5-hydroxymethylcytosine
aaggttcgttacgtagacgatggatagtgagactattgatcgattaac

SEQ ID NO: 28 - DNA, 48 bp, synthetic construct
  source 1..48: mol_type = other DNA
  modified_base 6: mod_base = OTHER; note = deoxyuracil
  modified_base 10: mod_base = OTHER; note = deoxyuracil
  modified_base 14: mod_base = OTHER; note = deoxyuracil
  modified_base 21: mod_base = OTHER; note = deoxyuracil
  modified_base 25: mod_base = OTHER; note = deoxyuracil
  modified_base 28: mod_base = OTHER; note = deoxyuracil
  modified_base 34: mod_base = OTHER; note = deoxyuracil
  modified_base 36: mod_base = OTHER; note = deoxyuracil
  modified_base 40: mod_base = OTHER; note = deoxyuracil
  modified_base 45: mod_base = OTHER; note = deoxyuracil
  modified_base 12: mod_base = OTHER; note = 5-hydroxymethylcytosine
  modified_base 33: mod_base = OTHER; note = 5-hydroxymethylcytosine
  modified_base 48: mod_base = OTHER; note = 5-hydroxymethylcytosine
aaggtttgttacgtagatgatggatagtgagactattgattgattaac

SEQ ID NO: 29 - DNA, 48 bp, synthetic construct
  source 1..48: mol_type = other DNA
  modified_base 12: mod_base = OTHER; note = Hydroxymethyldeoxyuridine
  modified_base 33: mod_base = OTHER; note = Hydroxymethyldeoxyuridine
  modified_base 48: mod_base = OTHER; note = Hydroxymethyldeoxyuridine
aaggtctgtcatgcagatgacggacagcgagatcactgactgatcaat

SEQ ID NO: 30 - DNA, 48 bp, synthetic construct
  source 1..48: mol_type = other DNA
  modified_base 7: mod_base = m5c
  modified_base 18: mod_base = m5c
  modified_base 41: mod_base = m5c
  modified_base 12: mod_base = OTHER; note = Hydroxymethyldeoxyuridine
  modified_base 33: mod_base = OTHER; note = Hydroxymethyldeoxyuridine
  modified_base 48: mod_base = OTHER; note = Hydroxymethyldeoxyuridine
aaggtccgtcatgcagacgacggacagcgagatcactgaccgatcaat

SEQ ID NO: 31 - DNA, 20 bp, synthetic construct
  source 1..20: mol_type = other DNA
  modified_base 10: mod_base = m5c
  modified_base 16: mod_base = OTHER; note = 5-hydroxymethylcytosine
ccgtcggaccgattcctaag

SEQ ID NO: 32 - DNA, 20 bp, synthetic construct
  source 1..20: mol_type = other DNA
  modified_base 16: mod_base = OTHER; note = 5-hydroxymethyldeoxyuridine
ccgtcggactgattcttaag

SEQ ID NO: 33 - DNA, 20 bp, synthetic construct
  source 1..20: mol_type = other DNA
ccgtcggactgattcttaag

SEQ ID NO: 34 - DNA, 20 bp, synthetic construct
  source 1..20: mol_type = other DNA
  modified_base 10: mod_base = m5c
  modified_base 16: mod_base = OTHER; note = beta-glycosyl-5-hydroxymethylcytosine
ccgtcggaccgattcctaag

SEQ ID NO: 35 - DNA, 20 bp, synthetic construct
  source 1..20: mol_type = other DNA
  modified_base 16: mod_base = OTHER; note = beta-glycosyl-5-hydroxymethylcytosine
ccgtcggactgattcctaag

SEQ ID NO: 36 - DNA, 20 bp, synthetic construct
  source 1..20: mol_type = other DNA
ccgtcggactgattcctaag

SEQ ID NO: 37 - protein, 188 aa, Gorilla gorilla
MDSLLMNRRKFLYQFKNVRWAKGRRETYLCYVVKRRDSATSFSLDFGYLRNKNGCHVELLFLRYISDWDLDPGRCYRVTWFTSWSPCYDCARHVADFLRGNPNLSLRIFTARLYFCEDRKAEPEGLRRLHRAGVQIAIMTFKENHERTFKAWEGLHENSVRLSRQLRRILLPLYEVDDLRDAFRTLGL

SEQ ID NO: 38 - protein, 198 aa, Mus musculus
MDSLLMKQKKFLYHFKNVRWAKGRHETYLCYVVKRRDSATSCSLDFGHLRNKSGCHVELLFLRYISDWDLDPGRCYRVTWFTSWSPCYDCARHVAEFLRWNPNLSLRIFTARLYFCEDRKAEPEGLRRLHRAGVQIGIMTFKDYFYCWNTFVENRERTFKAWEGLHENSVRLTRQLRRILLPLYEVDDLRDAFRMLGF

SEQ ID NO: 39 - protein, 191 aa, Gorilla gorilla
MSRKIWRSSGKNTTNHVEVNFIKKFTSERHFHPSISCSITWFLSWSPCWECSQAIREFLSQHPGVTLVIYVARLFWHMDQQNRQGLRDLVNSGVTIQIMRASEYYHCWRNFVNYPPGDEAHWPQYPPLWMMLYALELHCIILSLPPCLKISRRWQNHLTFFRLHLQNCHYQTIPPHILLATGLIHPSVAWR

SEQ ID NO: 40 - protein, 229 aa, Mus musculus
MSSETGPVAVDPTLRRRIEPHEFEVFFDPRELRKETCLLYEINWGGRHSVWRHTSQNTSNHVEVNFLEKFTTERYFRPNTRCSITWFLSWSPCGECSRAITEFLSRHPYVTLFIYIARLYHHTDQRNRQGLRDLISSGVTIQIMTEQEYCYCWRNFVNYPPSNEAYWPRYPHLWVKLYVLELYCIILGLPPCLKILRRKQPQLTFFTITLQTCHYQRIPPHLLWATGLK

SEQ ID NO: 41 - protein, 230 aa, Gorilla gorilla
MAQKEEAAAATEAAAATEAASQNGEDLENLDDPEKLKELIELPPFEIVTGERLPANFFKFQFRNVEYSSGRNKTFLCYVVEAQGKGGQVQASRGYLEDEHAAAHAEEAFFNTILPAFDPALRYNVTWYVSSSPCAACADRIIKTLSKTKNLRLLILVGRLFMWEEPEIQAALKKLKEAGCKLRIMKPQDFEYVWQNFVEQEEGESKAFQPWEDIQENFLYYEEKLADILK

SEQ ID NO: 42 - protein, 224 aa, Mus musculus
MAQKEEAAEAAAPASQNGDDLENLEDPEKLKELIDLPPFEIVTGVRLPVNFFKFQFRNVEYSSGRNKTFLCYVVEVQSKGGQAQATQGYLEDEHAGAHAEEAFFNTILPAFDPALKYNVTWYVSSSPCAACADRILKTLSKTKNLRLLILVSRLFMWEEPEVQAALKKLKEAGCKLRIMKPQDFEYIWQNFVEQEEGESKAFEPWEDIQENFLYYEEKLADILK

SEQ ID NO: 43 - protein, 382 aa, Gorilla gorilla
MNPQIRNPMERMYRGTFYNNFENEPILYGRSYNWLCYEVKIKRGRSNLLWNTGVFRGQMYSQPEHHAEMCFLSWFCGNQLPAYKCFQITWFVSWTPCPDCVAKLAEFLAEYPNVTLTISTARLYYYWERDYRRALCRLSQAGARMKIMDYEECAYCWENFVYKEGQQFMPWYKFDENYAFLHHTLKEILRHLMDPDTFTFNFNNDPLVLRRHQTYLCYEVERLDNGTWVLMDRHMGFLCNEAKNLLCGFYGRHAELRFLDLVPSLQLDPAQIYRVTWFISWSPCFSWGCAGQVCEFLQENTHMRLRIFAARIYDYDPLYKKALQMLRDAGAQVSIMTYDEFKHCWDTFVYRQGCPFQPWDGLEEHSQALSGRLQAILQNQGN

SEQ ID NO: 44 - protein, 382 aa, Macaca mulatta
MNPQIRNPMERMYRRTFNYNFENEPILYGRSYTWLCYEVKIRKDPSKLPWDTGVFRGQMYSKPEHHAEMCFLSWFCGNQLPAHKRFQITWFVSWTPCPDCVAKVAEFLAEYPNVTLTISAARLYYYWETDYRRALCRLRQAGARVKIMDYEEFAYCWENFVYNEDQSFMPWYKFDDNYAFLHHKLKEILRHLMDPDTFTSNFNNDLSVLGRHQTYLCYEVERLDNGTWVPMDQHWGFLCNQAKNVPRGDYGCHAELCFLDQVSSWQLDPAQTYRVTWFISWSPCFSWGCADQVYAFLQENTHVRLRIFAARIYDYNPLYQEALRTLRDAGAQVSIMTYDEFEYCWDTFVDRQGRPFQPWDGLDEHSQALSGRLRAILQNQGN

SEQ ID NO: 45 - protein, 190 aa, Gorilla gorilla
MNPQIRNPMKAMYPGTFYFQFKNLWEANDRNETWLCFTVEGIKRRSVVSWKTGVFRNQVDSETHCHAERCFLSWFCDDILSPNTNYQVTWYTSWSPCPECAGEVAEFLARHSNVNLTIFTARLYYFQDTDYQEGLRSLSQEGVAVKIMDYKDFKYCWENFVYNDDEPFKPWKGLKYNFRFLKRRLQEILE

SEQ ID NO: 46 - protein, 190 aa, Macaca mulatta
MNPQIRNPMKAMDPGTFYFQFKNLWEANNRNETWLCFTVEVIKQHSTVSWETGVFRNQVDLETHCHAERCFLSWFCEDILSPNTDYQVTWYTSWSPCLDCAGEVAKFLARHNNVMLTIYTARLYYSQYPNYQQGLRSLSEKGVSVKIMDYEDFKYCWEKFVYDDGEPFKPWKGLKTSFRFLKRRLREILQ

SEQ ID NO: 47 - protein, 386 aa, Pan troglodytes
MNPQIRNPMERMYRRTFYNHFENEPILYGRSYTWLCYEVKIKRGCSNLIWDTGVFRGPVLPKLQSNHRQEVYFQFENHAEMCFFSWFCGNRLPANRRFQITWFVSWNPCLPCVVKVTKFLAEHPNVTLTISAARLYYYQDREWRRVLRRLHKAGARVKIMDYKDFAHCWENFVYNEGQQFMPWYKFDDNYASLHRTLKEILRNPMEAMYPHVFYFHFKNLLKACGRNESWLCFTVDVTEHHPPVSWKRGVFRNPVDPETHCHAERCFLSWFCDDILSPNTNYQVTWYTSWSPCPECAREVAEFLARHSNVKLTIFTARLYHFWNTDYQEGLCSLSQEGASVKIMSYKDFVSCWKNFVYSDDEPFKPWKGLKTNFRLLKTMLREILQ

SEQ ID NO: 48 - protein, 374 aa, Macaca mulatta
MNPQIRNPMERMYRRTFNYNFENEPILYGRSYTWLCYEVKIRKDPSKLPWDTGVFRGQVYFQPQYHAEMCFLSWFCGNQLPAYKRFQITWFVSWNPCPDCVAKVTEFLAEHPNVTLTISVARLYYYRGKDWRRALCRLHQAGARVKIMDYEEFAYCWENFVYNEGQSFMPWDKFDDNYAFLHHKLKEILRNPMKAMYPHTFYFHFENLQKAYGRNETWLCFAVEIIKQHSTVPWKTGVFRNQVDPETHCHAERCFLSWFCDNTLSPKKNYQVTWYISWSPCPECAGEVAEFLATHSNVKLTIYTARLYYFWDTDYQEGLRSLSEEGASMEIMGYEDFKYCWENFVYNDGEPFKPWKGINTNFRFLERRLWKILQ

SEQ ID NO: 49 - protein, 373 aa, Gorilla gorilla
MKPQFRNTVERMYRGTFSYNFNNRPILSRRNTVWLCYEVKTKGPSRPPLDAKIFRGQVYFQPQYHAEMCFLSWFCGNQLPAYKCFQITCFVSWTPCPDCVAKLAEFLAEHPNVTLTISAARLYYYWERDYRRALRRLRQAGARVKIMDDEEFAYCWENFVYSEGQPFMPWHKFDDNYAFLHRTLKEILRNPMEAMYPHIFYFHFKNLLKAYGRNESWLCFTMEVIKHHSPVSWKRGVFRNQVDSETHCHAERCFLSWFCDDILSPNTNYQVTWYTSWSPCPECAGEVAEFLARHSNVNLTIFTARLYYFWDTDYQEGLRSLNQEGASVKIMGYKDFKYCWENFVYNDDEPFKPWKGLKYNFLFLDSKLQEILE

SEQ ID NO: 50 - protein, 373 aa, Macaca mulatta
MQPQYRNTVERMYRGTFFYNFNNRPILSRRNTVWLCYEVKTRGPSMPTWDTKIFRGQVYSKPEHHAEMCFLSRFCGNQLPAYKRFQITWFVSWTPCPDCVAKVAEFLAEHPNVTLTISAARLYYYWETDYRRALCRLRQAGARVKIMDYEEFAYCWENFVYNEGQSFMPWDKFDDNYAFLHHKLKEILRNPMEATYPHIFYFHFKNLRKAYGRNETWLCFTMEIIKQHSTVSWETGVFRNQVDPESRCHAERCFLSWFCEDILSPNTDYQVTWYTSWSPCLDCAGEVAEFLARHSNVKLAIFAARLYYFWDTHYQQGLRSLSEKGASVEIMGYKDFKYCWENFVYNGDEPFKPWKGLKYNFLFLDSKLQEILE

SEQ ID NO: 51 - protein, 384 aa, Gorilla gorilla
MTPQFRNTVERMYRDTFSYNFNNRPILSRRNTVWLCYEVKTKDPSRPPLDAKIFRGQVYSELKYHPEMRFFHWFSKWRKLHRDQEYEVTWYISWSPCTKCTRNVATFLAEDPKVTLTIFVARLYYFWDQDYQEALRSLCQKRDGPRATMKIMNYDEFQHCWSKFVYSQRELFEPWNNLPKYYMLLHIMLGEILRHSMDPPTFTSNFNNEHWVRGRHETYLCYEVERLHNDTWVLLNQRRGFLCNQAPHKHGFLEGRHAELCFLDVIPFWKLDLHQDYRVTCFTSWSPCFSCAQEMAKFISNKKHVSLCIFAARIYDDQGRCQEGLRTLAEAGAKISIMTYSEFKHCWDTFVYHQGCPFQPWDGLEEHSQALSGRLQAILQNQGN

SEQ ID NO: 52 - protein, 384 aa, Macaca mulatta
MNPQIRNMVEPMDPRTFVSNFNNRPILSGLNTVWLCCEVKTKDPSGPPLDAKIFQGKVLRSKAKYHPEMRFLQWFREWRQLHHDQEYKVTWYVSWSPCTRCANSVATFLAKDPKVTLTIFVARLYYFWKPNYQQALRILCQKRDGPHATMKIMNYNEFQDCWNKFVDGRGKPFKPWNNLPKHYTLLQATLGELLRHLMDPGTFTSNFNNKPWVSGQHETYLCYKVERLHNDTWVPLNQHRGFLRNQAPNIHGFPKGRHAELCFLDLIPFWKLDGQQYRVTCFTSWSPCFSCAQEMAKFISNNEHVSLCIFAARIYDDQGRYQEGLRTLHRDGAKIAMMNYSEFEYCWDTFVDCQGCPFQPWDGLDEHSQALSERLRAILQNQGN

SEQ ID NO: 53 - protein, 210 aa, Gorilla gorilla
MALLTAETFRLQFNNKLRLRRPYYRRKTLLCYQLTPQNGSMPTRGYFKNKKKCHAEICFINEIKSMGLDETQCYQVTCYLTWSPCSSCAWKLVDFIKAHDHLNLRIFASRLYYHWCKRQQEGLRLLCGSQVPVEVMGFPEFADCWENFVDHEKPLSFDPSKMLEELDKNSQAIKRRLERIKSRSVDVLENGLRSLQLGPVTPSSSRSNSR

SEQ ID NO: 54 - protein, 210 aa, Macaca mulatta
MALLTAKTFSLQFNNKRRVNKPYYPRKALLCYQLTPQNGSTPTRGHLKNKKKDHAEIRFINKIKSMGLDETQCYQVTCYLTWSPCPSCAGELVDFIKAHRHLNLRIFASRLYYHWRPNYQEGLLLLCGSQVPVEVMGLPEFTDCWENFVDHKEPPSFNPSEKLEELDKNSQAIKRRLERIKSRSVDVLENGLRSLQLGPVTPSSSIRNSR

SEQ ID NO: 55 - protein, 368 aa, Gorilla gorilla
MEPIYEEYLANHGTIVKPYYWLSFSLDCSNCPYHIRTGEEARVSLTEFCQIFGFPYGTTFPQTKHLTFYELKTSSGSLVQKGHASSCTGNYIHPESMLFEMNGYLDSAIYNNDSIRHIILYSNNSPCNEANHCCISKMYNFLITYPGITLSIYFSQLYHTEMDFPASAWNREALRSLASLWPRVVLSPISGGIWHSVLHSFISGVSGSHVFQPILTGRALADRHNAYEINAITGVKPYFTDVLLQTKRNPNTKAQEALESYPLNNAFPGQSFQMPSGQLQPNLPPDVRAPVVFVLVPLRDLPPMHMGQNPNKPRNIVRHLNMPQMSFQETEDLGRLPTGRSVEIVEITERFASSKEADEKKKKKKGKK

SEQ ID NO: 56 - protein, 374 aa, Mus musculus
MEPLYEEILTQGGTIVKPYYWLSLSLGCTNCPYHIRTGEEARVPYTEFHQTFGFPWSTYPQTKHLTFYELRSSSKNLIQKGLASNCTGSHNHPEAMLFEKNGYLDAVIFHNSNIRHIILYSNNSPCNEAKHCCISKMYNFLMNYPEVTLSVFFSQLYHTEKQFPTSAWNRKALQSLASLWPQVTLSPICGGLWHAILEKFVSNISGSTVPQPFIAGRILADRYNTYEINSIIAAKPYFTDGLLSRQKENQNREAWAAFEKHPLGSAAPAQRQPTRGQDPRTPAVLMLVSNRDLPPIHVGSTPQKPRTVVRHLNMLQLSSFKVKDVKKPPSGRPVEEVEVMKESARSQKANKKNRSQWKKQTLVIKPRICRLLER

SEQ ID NO: 57 - DNA, 48 bp, synthetic construct; identical to SEQ ID NO: 24
  source 1..48: mol_type = other DNA
  modified_base 6: mod_base = OTHER; note = Protective group
  modified_base 10: mod_base = OTHER; note = Protective group
  modified_base 14: mod_base = OTHER; note = Protective group
  modified_base 21: mod_base = OTHER; note = Protective group
  modified_base 25: mod_base = OTHER; note = Protective group
  modified_base 28: mod_base = OTHER; note = Protective group
  modified_base 34: mod_base = OTHER; note = Protective group
  modified_base 36: mod_base = OTHER; note = Protective group
  modified_base 40: mod_base = OTHER; note = Protective group
  modified_base 45: mod_base = OTHER; note = Protective group
  modified_base 7: mod_base = m5c
  modified_base 18: mod_base = m5c
  modified_base 41: mod_base = m5c
  modified_base 12: mod_base = OTHER; note = 5-hydroxymethylcytosine
  modified_base 33: mod_base = OTHER; note = 5-hydroxymethylcytosine
  modified_base 48: mod_base = OTHER; note = 5-hydroxymethylcytosine

SEQ ID NO: 58 - skipped

SEQ ID NO: 59 - protein, 199 aa, synthetic construct
MEASPASGPRHLMDPHIFTSNFNNGIGRHKTYLCYEVERLDNGTSVKMDQHRGFLHNQAKNLLCGFYGRHAELRFLDLVPSLQLDPAQIYRVTWFISWSPCFSWGCAGEVRAFLQENTHVRLRIFAARIWDYDPLYKEALQMLRDAGAQVSIMTYDEFKHCWDTFVDHQGCPFQPWDGLDEHSQALSGRLRAILQNQGN

SEQ ID NO: 60 - DNA, 101 bp, synthetic construct
  source 1..101: mol_type = other DNA
  modified_base 24: mod_base = m5c
  modified_base 26: mod_base = m5c
  modified_base 32: mod_base = m5c
  modified_base 37: mod_base = m5c
  modified_base 42: mod_base = m5c
  modified_base 54: mod_base = m5c
  modified_base 61: mod_base = m5c
  modified_base 67: mod_base = m5c
  modified_base 72: mod_base = m5c
  modified_base 47: mod_base = OTHER; note = 5-hydroxymethylcytosine
  modified_base 59: mod_base = OTHER; note = 5-hydroxymethylcytosine
  modified_base 64: mod_base = OTHER; note = 5-hydroxymethylcytosine
  modified_base 69: mod_base = OTHER; note = 5-hydroxymethylcytosine
  modified_base 75: mod_base = OTHER; note = 5-hydroxymethylcytosine
  modified_base 79: mod_base = OTHER; note = 5-hydroxymethylcytosine
  modified_base 83: mod_base = OTHER; note = 5-hydroxymethylcytosine
gaggtgtatggttgtactaatcactcctcgacgaatcgtaacacaacgtgcagccaaacgcttcgccacggcaacgtgcggactcgttgaagatgaggatg

SEQ ID NO: 61 - protein, 199 aa, synthetic construct
  VARIANT 130: note = X can be any amino acid
  VARIANT 133: note = X can be any amino acid
MEASPASGPRHLMDPHIFTSNFNNGIGRHKTYLCYEVERLDNGTSVKMDQHRGFLHNQAKNLLCGFYGRHAELRFLDLVPSLQLDPAQIYRVTWFISWSPCFSWGCAGEVRAFLQENTHVRLRIFAARIXDYXPLYKEALQMLRDAGAQVSIMTYDEFKHCWDTFVDHQGCPFQPWDGLDEHSQALSGRLRAILQNQGN

SEQ ID NO: 62 - protein, 199 aa, synthetic construct
  VARIANT 129: note = Can be L or I
  VARIANT 130: note = X can be A, G, F, H, Q, M, N, K, V, D, E, S, C, P or T, preferably, X is A or L or W
XXXXXXXXXXXXXXXXXXXXXXXXXXGRXXTXLCYXVXXXXXXXXXXXXXXXGXXXNXXXXXXXXXXXXHAEXXFXXXXXXXXXXXXXXYXXTWXXSWSPCXXXXCAXXXXXFLXXXXXXXLXIXXXRXXXXXXXXXXGLXXLXXXGXXXXXMXXXXFXXCWXXFVXXXXXXFXPWXXXXXXXXXXXXXLXXIXXXXXX

SEQ ID NO: 63 - protein, 199 aa, synthetic construct
  VARIANT 130: note = X can be any amino acid
  VARIANT 132: note = X can be any amino acid
MEASPASGPRHLMDPHIFTSNFNNGIGRHKTYLCYEVERLDNGTSVKMDQHRGFLHNQAKNLLCGFYGRHAELRFLDLVPSLQLDPAQIYRVTWFISWSPCFSWGCAGEVRAFLQENTHVRLRIFAARIXDXDPLYKEALQMLRDAGAQVSIMTYDEFKHCWDTFVDHQGCPFQPWDGLDEHSQALSGRLRAILQNQGN

SEQ ID NO: 64 - protein, 189 aa, synthetic construct
  VARIANT 130: note = A, G, F, H, Q, M, N, K, V, D, S, E, C, P, or T
  VARIANT 132: note = R, H, K, or Q
  VARIANT 133: note = W or C
MEASPASGPRHLMDPHTFYSNFNNKIGRHKTYLCYEVERLDNGTWVKMDQHRGFLHNQPRRHAELLFLDLVPSLQLDPAQIYRVTWFISWSPCFSCACEVRAFLQENTHVRLRIFAARIXDXXPLYKEALQMLRDAGAQVSIMTYDEFKHCWDTFVDHQGAPFQPWDGLDEHSQALSRRLRAILQNQGN

SEQ ID NO: 65 - protein, 199 aa, synthetic construct
  VARIANT 130: note = A, G, F, H, Q, M, N, K, V, D, S, E, C, P, or T
  VARIANT 132: note = R, H, K, or Q
  VARIANT 133: note = W or C
MEASPASGPRHLMDPHIFTSNFNNGIGRHKTYLCYEVERLDNGTSVKMDQHRGFLHNQAKNLLCGFYGRHAELRFLDLVPSLQLDPAQIYRVTWFISWSPCFSWGCAGEVRAFLQENTHVRLRIFAARIXDXXPLYKEALQMLRDAGAQVSIMTYDEFKHCWDTFVDHQGCPFQPWDGLDEHSQALSGRLRAILQNQGN

SEQ ID NO: 66 - protein, 189 aa, synthetic construct
  VARIANT 130: note = A, G, F, H, Q, M, N, K, V, D, S, E, C, P, or T
  VARIANT 132: note = R, H, K,or Q
  VARIANT 133: note = W or C
MEASPASGPRHLMDPHTFYSNFNNKIGRHKTYLCYEVERLDNGTWVKMDQHRGFLHNQPRRHAALLFLDLVPSLQLDPAQIYRVTWFISWSPCFSCACEVRAFLQENTHVRLRIFAARIXDXXPLYKEALQMLRDAGAQVSIMTYDEFKHCWDTFVDHQGAPFQPWDGLDEHSQALSRRLRAILQNQGN

SEQ ID NO: 67 - protein, 199 aa, synthetic construct
  VARIANT 130: note = A, G, F, H, Q, M, N, K, V, D, S, E, C, P, or T
  VARIANT 132: note = R, H, K, or Q
  VARIANT 133: note = W or C
MEASPASGPRHLMDPHIFTSNFNNGIGRHKTYLCYEVERLDNGTSVKMDQHRGFLHNQAKNLLCGFYGRHAALRFLDLVPSLQLDPAQIYRVTWFISWSPCFSWGCAGEVRAFLQENTHVRLRIFAARIXDXXPLYKEALQMLRDAGAQVSIMTYDEFKHCWDTFVDHQGCPFQPWDGLDEHSQALSGRLRAILQNQGN

SEQ ID NO: 68 - protein, 199 aa, synthetic construct
MEASPASGPRHLMDPHIFTSNFNNGIGRHKTYLCYEVERLDNGTSVKMDQHRGFLHNQAKNLLCGFYGRHAELRFLDLVPSLQLDPAQIYRVTWFISWSPCFSWGCAGEVRAFLQENTHVRLRIFAARIADHDPLYKEALQMLRDAGAQVSIMTYDEFKHCWDTFVDHQGAPFQPWDGLDEHSQALSGRLRAILQNQGN

SEQ ID NO: 69 - protein, 199 aa, synthetic construct
MEASPASGPRHLMDPHIFTSNFNNGIGRHKTYLCYEVERLDNGTSVKMDQHRGFLHNQAKNLLCGFYGRHAELRFLDLVPSLQLDPAQIYRVTWFISWSPCFSWGCAGEVRAFLQENTHVRLRIFAARIADHWPLYKEALQMLRDAGAQVSIMTYDEFKHCWDTFVDHQGCPFQPWDGLDEHSQALSGRLRAILQNQGN

SEQ ID NO: 70 - protein, 199 aa, synthetic construct
MEASPASGPRHLMDPHIFTSNFNNGIGRHKTYLCYEVERLDNGTSVKMDQHRGFLHNQAKNLLCGFYGRHAELLFLDLVPSLQLDPAQIYRVTWFISWSPCFSWGCAGEVRAFLQENTHVRLRIFAARIADHWPLYKEALQMLRDAGAQVSIMTYDEFKHCWDTFVDHQGCPFQPWDGLDEHSQALSGRLRAILQNQGN

SEQ ID NO: 71 - protein, 199 aa, synthetic construct
MEASPASGPRHLMDPHIFYSNFNNGIGRHKTYLCYEVERLDNGTSVKMDQHRGFLHNQAKNLLCGFYGRHAELLFLDLVPSLQLDPAQIYRVTWFISWSPCFSWGCAGEVRAFLQENTHVRLRIFAARIADHWPLYKEALQMLRDAGAQVSIMTYDEFKHCWDTFVDHQGCPFQPWDGLDEHSQALSGRLRAILQNQGN

SEQ ID NO: 72 - protein, 199 aa, synthetic construct
MEASPASGPRHLMDPHIFYSNFNNGIGRHKTYLCYEVERLDNGTSVKMDQHRGFLHNQAKNLLCGFYGRHAELLFLDLVPSLQLDPAQIYRVTWFISWSPCFSWGCAGEVRAFLQENTHVRLRIFAARIADHWPLYKEALQMLRDAGAQVSIMTYDEFKHCWDTFVDHQGAPFQPWDGLDEHSQALSGRLRAILQNQGN

SEQ ID NO: 73 - protein, 199 aa, synthetic construct
MEASPASGPRHLMDPHTFYSNFNNRIGRHKTYLCYEVERLDNGTSVKMDQHRGFLHNQAKNLLCGFYGRHAELLFLDLVPSLQLDPAQIYRVTWFISWSPCFSWGCAGEVRAFLQENTHVRLRIFAARIADHWPLYKEALQMLRDAGAQVSIMTYDEFKHCWDTFVDHQGAPFQPWDGLDEHSQALSGRLRAILQNQGN

SEQ ID NO: 74 - protein, 199 aa, synthetic construct
MEASPASGPRHLMDPHIFYSNFNNKIGRHKTYLCYEVERLDNGTWVKMDQHRGFLHNQAKNLLCGFYGRHAELLFLDLVPSLQLDPAQIYRVTWFISWSPCFSWGCAAEVRAFLQENTHVRLRIFAARIADHWPLYKEALQMLRDAGAQVSIMTYDEFKHCWDTFVDHQGAPFQPWDGLDEHSQALSRRLRAILQNQGN

SEQ ID NO: 75 - protein, 191 aa, synthetic construct
MEASPASGPRHLMDPHTFYSNFNNKIGRHKTYLCYEVERLDNGTWVKMDQHRGFLHNQPRRHAELLFLDLVPSLQLDPAQIYRVTWFISWSPCFSWGCACEVRAFLQENTHVRLRIFAARIADHWPLYKEALQMLRDAGAQVSIMTYDEFKHCWDTFVDHQGAPFQPWDGLDEHSQALSRRLRAILQNQGN

SEQ ID NO: 76 - protein, 191 aa, synthetic construct
MEASPASGPRHLMDPHTFYSNFNNKIGRHKTYLCYEVERLDNGTWVKMDQHRGFLHNQPRRHAELLFLDLVPSLQLDPAQIYRVTWFISWSPCFSWGCACEVRAFLQENTHVRLRIFCARIADHWPLYKEALQMLRDAGAQVSIMTYDEFKHCWDTFVDHQGAPFQPWDGLDEHSQALSRRLRAILQNQGN

SEQ ID NO: 77 - protein, 189 aa, synthetic construct
MEASPASGPRHLMDPHTFYSNFNNKIGRHKTYLCYEVERLDNGTWVKMDQHRGFLHNQPRRHAELLFLDLVPSLQLDPAQIYRVTWFISWSPCFSCACEVRAFLQENTHVRLRIFAARIADHWPLYKEALQMLRDAGAQVSIMTYDEFKHCWDTFVDHQGAPFQPWDGLDEHSQALSRRLRAILQNQGN

SEQ ID NO: 78 - protein, 199 aa, synthetic construct; identical to SEQ ID NO: 65
  VARIANT 130: note = F, L, I, or Y
  VARIANT 132: note = P or H
  VARIANT 133: note = W, D, K, or R

SEQ ID NO: 79 - protein, 199 aa, synthetic construct
  VARIANT 133: note = W, D, K, or R
MEASPASGPRHLMDPHIFTSNFNNGIGRHKTYLCYEVERLDNGTSVKMDQHRGFLHNQAKNLLCGFYGRHAELRFLDLVPSLQLDPAQIYRVTWFISWSPCFSWGCAGEVRAFLQENTHVRLRIFAARILDHXPLYKEALQMLRDAGAQVSIMTYDEFKHCWDTFVDHQGCPFQPWDGLDEHSQALSGRLRAILQNQGN

SEQ ID NO: 80 - protein, 199 aa, synthetic construct
MEASPASGPRHLMDPHIFTSNFNNGIGRHKTYLCYEVERLDNGTSVKMDQHRGFLHNQAKNLLCGFYGRHAELRFLDLVPSLQLDPAQIYRVTWFISWSPCFSWGCAGEVRAFLQENTHVRLRIFAARILDHWPLYKEALQMLRDAGAQVSIMTYDEFKHCWDTFVDHQGCPFQPWDGLDEHSQALSGRLRAILQNQGN

SEQ ID NO: 81 - protein, 199 aa, synthetic construct
MEASPASGPRHLMDPHIFTSNFNNGIGRHKTYLCYEVERLDNGTSVKMDQHRGFLHNQAKNLLCGFYGRHAELRFLDLVPSLQLDPAQIYRVTWFISWSPCFSWGCAGEVRAFLQENTHVRLRIFAARIFDPWPLYKEALQMLRDAGAQVSIMTYDEFKHCWDTFVDHQGCPFQPWDGLDEHSQALSGRLRAILQNQGN

SEQ ID NO: 82 - protein, 199 aa, synthetic construct
MEASPASGPRHLMDPHIFTSNFNNGIGRHKTYLCYEVERLDNGTSVKMDQHRGFLHNQAKNLLCGFYGRHAELRFLDLVPSLQLDPAQIYRVTWFISWSPCFSWGCAGEVRAFLQENTHVRLRIFAARIYDPWPLYKEALQMLRDAGAQVSIMTYDEFKHCWDTFVDHQGCPFQPWDGLDEHSQALSGRLRAILQNQGN

SEQ ID NO: 83 - protein, 199 aa, synthetic construct
MEASPASGPRHLMDPHIFTSNFNNGIGRHKTYLCYEVERLDNGTSVKMDQHRGFLHNQAKNLLCGFYGRHAALRFLDLVPSLQLDPAQIYRVTWFISWSPCFSWGCAGEVRAFLQENTHVRLRIFAARIYDYDPLYKEALQMLRDAGAQVSIMTYDEFKHCWDTFVDHQGCPFQPWDGLDEHSQALSGRLRAILQNQGN

SEQ ID NO: 84 - protein, 199 aa, synthetic construct
MEASPASGPRHLMDPHIFTSNFNNGIGRHKTYLCYEVERLDNGTSVKMDQHRGFLHNQAKNLLCGFYGRHAALRFLDLVPSLQLDPAQIYRVTWFISWSPCFSWGCAGEVRAFLQENTHVRLRIFAARIADYDPLYKEALQMLRDAGAQVSIMTYDEFKHCWDTFVDHQGCPFQPWDGLDEHSQALSGRLRAILQNQGN

SEQ ID NO: 85 - protein, 199 aa, synthetic construct
MEASPASGPRHLMDPHIFTSNFNNGIGRHKTYLCYEVERLDNGTSVKMDQHRGFLHNQAKNLLCGFYGRHAALRFLDLVPSLQLDPAQIYRVTWFISWSPCFSWGCAGEVRAFLQENTHVRLRIFAARIADHDPLYKEALQMLRDAGAQVSIMTYDEFKHCWDTFVDHQGCPFQPWDGLDEHSQALSGRLRAILQNQGN

SEQ ID NO: 86 - protein, 199 aa, synthetic construct
MEASPASGPRHLMDPHIFTSNFNNGIGRHKTYLCYEVERLDNGTSVKMDQHRGFLHNQAKNLLCGFYGRHAALRFLDLVPSLQLDPAQIYRVTWFISWSPCFSWGCAGEVRAFLQENTHVRLRIFAARIADHDPLYKEALQMLRDAGAQVSIMTYDEFKHCWDTFVDHQGAPFQPWDGLDEHSQALSGRLRAILQNQGN

SEQ ID NO: 87 - protein, 199 aa, synthetic construct
MEASPASGPRHLMDPHIFTSNFNNGIGRHKTYLCYEVERLDNGTSVKMDQHRGFLHNQAKNLLCGFYGRHAALRFLDLVPSLQLDPAQIYRVTWFISWSPCFSWGCAGEVRAFLQENTHVRLRIFAARIADHWPLYKEALQMLRDAGAQVSIMTYDEFKHCWDTFVDHQGCPFQPWDGLDEHSQALSGRLRAILQNQGN

SEQ ID NO: 88 - protein, 199 aa, synthetic construct
MEASPASGPRHLMDPHIFTSNFNNGIGRHKTYLCYEVERLDNGTSVKMDQHRGFLHNQAKNLLCGFYGRHAALLFLDLVPSLQLDPAQIYRVTWFISWSPCFSWGCAGEVRAFLQENTHVRLRIFAARIADHWPLYKEALQMLRDAGAQVSIMTYDEFKHCWDTFVDHQGCPFQPWDGLDEHSQALSGRLRAILQNQGN

SEQ ID NO: 89 - protein, 199 aa, synthetic construct
MEASPASGPRHLMDPHIFYSNFNNGIGRHKTYLCYEVERLDNGTSVKMDQHRGFLHNQAKNLLCGFYGRHAALLFLDLVPSLQLDPAQIYRVTWFISWSPCFSWGCAGEVRAFLQENTHVRLRIFAARIADHWPLYKEALQMLRDAGAQVSIMTYDEFKHCWDTFVDHQGCPFQPWDGLDEHSQALSGRLRAILQNQGN

SEQ ID NO: 90 - protein, 199 aa, synthetic construct
MEASPASGPRHLMDPHIFYSNFNNGIGRHKTYLCYEVERLDNGTSVKMDQHRGFLHNQAKNLLCGFYGRHAALLFLDLVPSLQLDPAQIYRVTWFISWSPCFSWGCAGEVRAFLQENTHVRLRIFAARIADHWPLYKEALQMLRDAGAQVSIMTYDEFKHCWDTFVDHQGAPFQPWDGLDEHSQALSGRLRAILQNQGN

SEQ ID NO: 91 - protein, 199 aa, synthetic construct
MEASPASGPRHLMDPHTFYSNFNNRIGRHKTYLCYEVERLDNGTSVKMDQHRGFLHNQAKNLLCGFYGRHAALLFLDLVPSLQLDPAQIYRVTWFISWSPCFSWGCAGEVRAFLQENTHVRLRIFAARIADHWPLYKEALQMLRDAGAQVSIMTYDEFKHCWDTFVDHQGAPFQPWDGLDEHSQALSGRLRAILQNQGN

SEQ ID NO: 92 - protein, 199 aa, synthetic construct
MEASPASGPRHLMDPHIFYSNFNNKIGRHKTYLCYEVERLDNGTWVKMDQHRGFLHNQAKNLLCGFYGRHAALLFLDLVPSLQLDPAQIYRVTWFISWSPCFSWGCAAEVRAFLQENTHVRLRIFAARIADHWPLYKEALQMLRDAGAQVSIMTYDEFKHCWDTFVDHQGAPFQPWDGLDEHSQALSRRLRAILQNQGN

SEQ ID NO: 93 - protein, 191 aa, synthetic construct
MEASPASGPRHLMDPHTFYSNFNNKIGRHKTYLCYEVERLDNGTWVKMDQHRGFLHNQPRRHAALLFLDLVPSLQLDPAQIYRVTWFISWSPCFSWGCACEVRAFLQENTHVRLRIFAARIADHWPLYKEALQMLRDAGAQVSIMTYDEFKHCWDTFVDHQGAPFQPWDGLDEHSQALSRRLRAILQNQGN

SEQ ID NO: 94 - protein, 191 aa, synthetic construct
MEASPASGPRHLMDPHTFYSNFNNKIGRHKTYLCYEVERLDNGTWVKMDQHRGFLHNQPRRHAALLFLDLVPSLQLDPAQIYRVTWFISWSPCFSWGCACEVRAFLQENTHVRLRIFCARIADHWPLYKEALQMLRDAGAQVSIMTYDEFKHCWDTFVDHQGAPFQPWDGLDEHSQALSRRLRAILQNQGN

SEQ ID NO: 95 - protein, 189 aa, synthetic construct
MEASPASGPRHLMDPHTFYSNFNNKIGRHKTYLCYEVERLDNGTWVKMDQHRGFLHNQPRRHAALLFLDLVPSLQLDPAQIYRVTWFISWSPCFSCACEVRAFLQENTHVRLRIFAARIADHWPLYKEALQMLRDAGAQVSIMTYDEFKHCWDTFVDHQGAPFQPWDGLDEHSQALSRRLRAILQNQGN

SEQ ID NO: 96 - protein, 199 aa, synthetic construct
MEASPASGPRHLMDPHIFTSNFNNGIGRHKTYLCYEVERLDNGTSVKMDQHRGFLHNQAKNLLCGFYGRHAALRFLDLVPSLQLDPAQIYRVTWFISWSPCFSWGCAGEVRAFLQENTHVRLRIFAARILDHWPLYKEALQMLRDAGAQVSIMTYDEFKHCWDTFVDHQGCPFQPWDGLDEHSQALSGRLRAILQNQGN

SEQ ID NO: 97 - protein, 199 aa, synthetic construct
MEASPASGPRHLMDPHIFTSNFNNGIGRHKTYLCYEVERLDNGTSVKMDQHRGFLHNQAKNLLCGFYGRHAALRFLDLVPSLQLDPAQIYRVTWFISWSPCFSWGCAGEVRAFLQENTHVRLRIFAARIFDPWPLYKEALQMLRDAGAQVSIMTYDEFKHCWDTFVDHQGCPFQPWDGLDEHSQALSGRLRAILQNQGN

SEQ ID NO: 98 - protein, 199 aa, synthetic construct
MEASPASGPRHLMDPHIFTSNFNNGIGRHKTYLCYEVERLDNGTSVKMDQHRGFLHNQAKNLLCGFYGRHAALRFLDLVPSLQLDPAQIYRVTWFISWSPCFSWGCAGEVRAFLQENTHVRLRIFAARIYDPWPLYKEALQMLRDAGAQVSIMTYDEFKHCWDTFVDHQGCPFQPWDGLDEHSQALSGRLRAILQNQGN

SEQ ID NO: 99 - protein, 199 aa, synthetic construct; identical to SEQ ID NO: 67
  VARIANT 130: note = F, L, I,or Y
  VARIANT 132: note = P or H
  VARIANT 133: note = W, D, K, or R

SEQ ID NO: 100 - protein, 199 aa, synthetic construct
  VARIANT 133: note = W, D, K, or R
MEASPASGPRHLMDPHIFTSNFNNGIGRHKTYLCYEVERLDNGTSVKMDQHRGFLHNQAKNLLCGFYGRHAALRFLDLVPSLQLDPAQIYRVTWFISWSPCFSWGCAGEVRAFLQENTHVRLRIFAARILDHXPLYKEALQMLRDAGAQVSIMTYDEFKHCWDTFVDHQGCPFQPWDGLDEHSQALSGRLRAILQNQGN

SEQ ID NO: 101 - protein, 199 aa, synthetic construct
  VARIANT 133: note = A, G, S, or T
MEASPASGPRHLMDPHIFTSNFNNGIGRHKTYLCYEVERLDNGTSVKMDQHRGFLHNQAKNLLCGFYGRHAELRFLDLVPSLQLDPAQIYRVTWFISWSPCFSWGCAGEVRAFLQENTHVRLRIFAARIDDYXPLYKEALQMLRDAGAQVSIMTYDEFKHCWDTFVDHQGCPFQPWDGLDEHSQALSGRLRAILQNQGN

SEQ ID NO: 102 - protein, 199 aa, synthetic construct
  VARIANT 132: note = H, R, or K
  VARIANT 133: note = A, G, S, or T
MEASPASGPRHLMDPHIFTSNFNNGIGRHKTYLCYEVERLDNGTSVKMDQHRGFLHNQAKNLLCGFYGRHAELRFLDLVPSLQLDPAQIYRVTWFISWSPCFSWGCAGEVRAFLQENTHVRLRIFAARIDDXXPLYKEALQMLRDAGAQVSIMTYDEFKHCWDTFVDHQGCPFQPWDGLDEHSQALSGRLRAILQNQGN

SEQ ID NO: 103 - protein, 199 aa, synthetic construct
MEASPASGPRHLMDPHIFTSNFNNGIGRHKTYLCYEVERLDNGTSVKMDQHRGFLHNQAKNLLCGFYGRHAELRFLDLVPSLQLDPAQIYRVTWFISWSPCFSWGCAGEVRAFLQENTHVRLRIFAARIDDHAPLYKEALQMLRDAGAQVSIMTYDEFKHCWDTFVDHQGCPFQPWDGLDEHSQALSGRLRAILQNQGN

SEQ ID NO: 104 - protein, 199 aa, synthetic construct
MEASPASGPRHLMDPHIFTSNFNNGIGRHKTYLCYEVERLDNGTSVKMDQHRGFLHNQAKNLLCGFYGRHAELRFLDLVPSLQLDPAQIYRVTWFISWSPCFSWGCAGEVRAFLQENTHVRLRIFAARIDDHTPLYKEALQMLRDAGAQVSIMTYDEFKHCWDTFVDHQGCPFQPWDGLDEHSQALSGRLRAILQNQGN

SEQ ID NO: 105 - protein, 199 aa, synthetic construct
MEASPASGPRHLMDPHIFTSNFNNGIGRHKTYLCYEVERLDNGTSVKMDQHRGFLHNQAKNLLCGFYGRHAELRFLDLVPSLQLDPAQIYRVTWFISWSPCFSWGCAGEVRAFLQENTHVRLRIFAARIDDKSPLYKEALQMLRDAGAQVSIMTYDEFKHCWDTFVDHQGCPFQPWDGLDEHSQALSGRLRAILQNQGN

SEQ ID NO: 106 - protein, 199 aa, synthetic construct
MEASPASGPRHLMDPHIFTSNFNNGIGRHKTYLCYEVERLDNGTSVKMDQHRGFLHNQAKNLLCGFYGRHAELRFLDLVPSLQLDPAQIYRVTWFISWSPCFSWGCAGEVRAFLQENTHVRLRIFAARIDDKTPLYKEALQMLRDAGAQVSIMTYDEFKHCWDTFVDHQGCPFQPWDGLDEHSQALSGRLRAILQNQGN

SEQ ID NO: 107 - protein, 199 aa, synthetic construct
MEASPASGPRHLMDPHIFTSNFNNGIGRHKTYLCYEVERLDNGTSVKMDQHRGFLHNQAKNLLCGFYGRHAELRFLDLVPSLQLDPAQIYRVTWFISWSPCFSWGCAGEVRAFLQENTHVRLRIFAARIDDRSPLYKEALQMLRDAGAQVSIMTYDEFKHCWDTFVDHQGCPFQPWDGLDEHSQALSGRLRAILQNQGN

SEQ ID NO: 108 - protein, 199 aa, synthetic construct
  VARIANT 133: note = A, G, S, or T
MEASPASGPRHLMDPHIFTSNFNNGIGRHKTYLCYEVERLDNGTSVKMDQHRGFLHNQAKNLLCGFYGRHAALRFLDLVPSLQLDPAQIYRVTWFISWSPCFSWGCAGEVRAFLQENTHVRLRIFAARIDDYXPLYKEALQMLRDAGAQVSIMTYDEFKHCWDTFVDHQGCPFQPWDGLDEHSQALSGRLRAILQNQGN

SEQ ID NO: 109 - protein, 199 aa, synthetic construct
  VARIANT 132: note = H, R, or K
  VARIANT 133: note = A, G, S, or T
MEASPASGPRHLMDPHIFTSNFNNGIGRHKTYLCYEVERLDNGTSVKMDQHRGFLHNQAKNLLCGFYGRHAALRFLDLVPSLQLDPAQIYRVTWFISWSPCFSWGCAGEVRAFLQENTHVRLRIFAARIDDXXPLYKEALQMLRDAGAQVSIMTYDEFKHCWDTFVDHQGCPFQPWDGLDEHSQALSGRLRAILQNQGN

SEQ ID NO: 110-113 - skipped (4 entries)

SEQ ID NO: 114 - protein, 191 aa, synthetic construct
MEASPASGPRHLMDPHTFYSNFNNKIGRHKTYLCYEVERLDNGTWVKMDQHRGFLHNQPRRHAELLFLDLVPSLQLDPAQIYRVTWFISWSPCFSWGCACEVRAFLQENTHVRLRIFCARIYDYDPLYKEALQMLRDAGAQVSIMTYDEFKHCWDTFVDHQGAPFQPWDGLDEHSQALSRRLRAILQNQGN

SEQ ID NO: 115 - protein, 191 aa, synthetic construct
  VARIANT 122: note = X can be any amino acid
  VARIANT 124: note = X can be any amino acid
  VARIANT 125: note = X can be any amino acid
MEASPASGPRHLMDPHTFYSNFNNKIGRHKTYLCYEVERLDNGTWVKMDQHRGFLHNQPRRHAELLFLDLVPSLQLDPAQIYRVTWFISWSPCFSWGCACEVRAFLQENTHVRLRIFCARIXDXXPLYKEALQMLRDAGAQVSIMTYDEFKHCWDTFVDHQGAPFQPWDGLDEHSQALSRRLRAILQNQGN

SEQ ID NO: 116 - protein, 191 aa, synthetic construct; identical to SEQ ID NO: 115
  VARIANT 122: note = A, G, F, H, Q, M, N, K, V, D, S, E, C, P, T
  VARIANT 124: note = R, H, K, or Q
  VARIANT 125: note = W or C

SEQ ID NO: 117 - protein, 191 aa, synthetic construct; identical to SEQ ID NO: 115
  VARIANT 122: note = F, L, I, or Y
  VARIANT 124: note = P or H
  VARIANT 125: note = W, D, K, or R

SEQ ID NO: 118 - protein, 191 aa, synthetic construct; identical to SEQ ID NO: 115
  VARIANT 122: note = Y, A, F, L, W
  VARIANT 123: note = Y or H
  VARIANT 125: note = D or W

SEQ ID NO: 119 - protein, 191 aa, synthetic construct
MEASPASGPRHLMDPHTFYSNFNNKIGRHKTYLCYEVERLDNGTWVKMDQHRGFLHNQPRRHAELLFLDLVPSLQLDPAQIYRVTWFISWSPCFSWGCACEVRAFLQENTHVRLRIFCARIADHVPLYKEALQMLRDAGAQVSIMTYDEFKHCWDTFVDHQGAPFQPWDGLDEHSQALSRRLRAILQNQGN

SEQ ID NO: 120 - protein, 191 aa, synthetic construct
  VARIANT 124: note = R, H, or K
  VARIANT 125: note = A, G, S, or T
MEASPASGPRHLMDPHTFYSNFNNKIGRHKTYLCYEVERLDNGTWVKMDQHRGFLHNQPRRHAELLFLDLVPSLQLDPAQIYRVTWFISWSPCFSWGCACEVRAFLQENTHVRLRIFCARIDDXXPLYKEALQMLRDAGAQVSIMTYDEFKHCWDTFVDHQGAPFQPWDGLDEHSQALSRRLRAILQNQGN

SEQ ID NO: 121 - protein, 190 aa, synthetic construct
MEASPASGPRHLMDPHTFYSNFNNKIGRHKTYLCYEVERLDNGTWVKMDQHRGFLHNQPRRHAELLFLDLVPSLQLDPAQIYRVTWFISWSPCFSWCACEVRAFLQENTHVRLRIFCARIYDYDPLYKEALQMLRDAGAQVSIMTYDEFKHCWDTFVDHQGAPFQPWDGLDEHSQALSRRLRAILQNQGN

SEQ ID NO: 122 - protein, 190 aa, synthetic construct
  VARIANT 121: note = X can be any amino acid
  VARIANT 123: note = X can be any amino acid
  VARIANT 124: note = X can be any amino acid
MEASPASGPRHLMDPHTFYSNFNNKIGRHKTYLCYEVERLDNGTWVKMDQHRGFLHNQPRRHAELLFLDLVPSLQLDPAQIYRVTWFISWSPCFSWCACEVRAFLQENTHVRLRIFCARIXDXXPLYKEALQMLRDAGAQVSIMTYDEFKHCWDTFVDHQGAPFQPWDGLDEHSQALSRRLRAILQNQGN

SEQ ID NO: 123 - protein, 190 aa, synthetic construct; identical to SEQ ID NO: 122
  VARIANT 121: note = A, G, F, H, Q, M, N, K, V, D, S, E, C, P, or T
  VARIANT 123: note = R, H, K, or Q
  VARIANT 124: note = W or C

SEQ ID NO: 124 - protein, 190 aa, synthetic construct; identical to SEQ ID NO: 122
  VARIANT 121: note = F, L, I, or Y
  VARIANT 123: note = P or H
  VARIANT 124: note = W, D, K, or R

SEQ ID NO: 125 - protein, 190 aa, synthetic construct
  VARIANT 121: note = Y, A, F, L, or W
  VARIANT 123: note = Y or H
  VARIANT 124: note = D or W
MEASPASGPRHLMDPHTFYSNFNNKIGRHKTYLCYEVERLDNGTWVKMDQHRGFLHNQPRRHAELLFLDLVPSLQLDPAQIYRVTWFISWSPCFVPGCACEVRAFLQENTHVRLRIFCARXDXXWLYKEALQMLRDAGAQVSIMTYDEFKHCWDTFVDHQGAPFQPWDGLDEHSQALSRRLRAILQNQGN

SEQ ID NO: 126 - protein, 190 aa, synthetic construct
MEASPASGPRHLMDPHTFYSNFNNKIGRHKTYLCYEVERLDNGTWVKMDQHRGFLHNQPRRHAELLFLDLVPSLQLDPAQIYRVTWFISWSPCFSWCACEVRAFLQENTHVRLRIFCARIADHVPLYKEALQMLRDAGAQVSIMTYDEFKHCWDTFVDHQGAPFQPWDGLDEHSQALSRRLRAILQNQGN

SEQ ID NO: 127 - protein, 190 aa, synthetic construct
  VARIANT 123: note = R, H, or K
  VARIANT 124: note = A, G, S, or T
MEASPASGPRHLMDPHTFYSNFNNKIGRHKTYLCYEVERLDNGTWVKMDQHRGFLHNQPRRHAELLFLDLVPSLQLDPAQIYRVTWFISWSPCFSWCACEVRAFLQENTHVRLRIFCARIDDXXPLYKEALQMLRDAGAQVSIMTYDEFKHCWDTFVDHQGAPFQPWDGLDEHSQALSRRLRAILQNQGN

SEQ ID NO: 128 - skipped

SEQ ID NO: 129 - protein, 199 aa, synthetic construct
  VARIANT 132: note = H, R, or K
  VARIANT 133: note = A, G, S, or T
MEASPASGPRHLMDPHIFTSNFNNGIGRHKTYLCYEVERLDNGTSVKMDQHRGFLHNQAKNLLCGFYGRHAELLFLDLVPSLQLDPAQIYRVTWFISWSPCFSWGCAGEVRAFLQENTHVRLRIFAARIDDXXPLYKEALQMLRDAGAQVSIMTYDEFKHCWDTFVDHQGCPFQPWDGLDEHSQALSGRLRAILQNQGN

SEQ ID NO: 130 - protein, 199 aa, synthetic construct
  VARIANT 132: note = H, R, or K
  VARIANT 133: note = A, G, S, or T
MEASPASGPRHLMDPHIFYSNFNNGIGRHKTYLCYEVERLDNGTSVKMDQHRGFLHNQAKNLLCGFYGRHAELLFLDLVPSLQLDPAQIYRVTWFISWSPCFSWGCAGEVRAFLQENTHVRLRIFAARIDDXXPLYKEALQMLRDAGAQVSIMTYDEFKHCWDTFVDHQGCPFQPWDGLDEHSQALSGRLRAILQNQGN

SEQ ID NO: 131 - protein, 199 aa, synthetic construct
  VARIANT 132: note = H, R, or K
  VARIANT 133: note = A, G, S, or T
MEASPASGPRHLMDPHIFYSNFNNGIGRHKTYLCYEVERLDNGTSVKMDQHRGFLHNQAKNLLCGFYGRHAELLFLDLVPSLQLDPAQIYRVTWFISWSPCFSWGCAGEVRAFLQENTHVRLRIFAARIDDXXPLYKEALQMLRDAGAQVSIMTYDEFKHCWDTFVDHQGAPFQPWDGLDEHSQALSGRLRAILQNQGN

SEQ ID NO: 132 - protein, 199 aa, synthetic construct
  VARIANT 132: note = H, R, or K
  VARIANT 133: note = A, G, S, or T
MEASPASGPRHLMDPHTFYSNFNNRIGRHKTYLCYEVERLDNGTSVKMDQHRGFLHNQAKNLLCGFYGRHAELLFLDLVPSLQLDPAQIYRVTWFISWSPCFSWGCAGEVRAFLQENTHVRLRIFAARIDDXXPLYKEALQMLRDAGAQVSIMTYDEFKHCWDTFVDHQGAPFQPWDGLDEHSQALSGRLRAILQNQGN

SEQ ID NO: 133 - protein, 199 aa, synthetic construct
  VARIANT 132: note = H, R, or K
  VARIANT 133: note = A, G, S, or T
MEASPASGPRHLMDPHIFYSNFNNRIGRHKTYLCYEVERLDNGTWVKMDQHRGFLHNQAKNLLCGFYGRHAELLFLDLVPSLQLDPAQIYRVTWFISWSPCFSWGCAAEVRAFLQENTHVRLRIFAARIDDXXPLYKEALQMLRDAGAQVSIMTYDEFKHCWDTFVDHQGAPFQPWDGLDEHSQALSRRLRAILQNQGN

SEQ ID NO: 134 - protein, 191 aa, synthetic construct
  VARIANT 132: note = H, R, or K
  VARIANT 133: note = A, G, S, or T
MEASPASGPRHLMDPHIFYSNFNNRIGRHKTYLCYEVERLDNGTWVKMDQHRGFLHNQPRRHAELLFLDLVPSLQLDPAQIYRVTWFISWSPCFSWGCACEVRAFLQENTHVRLRIFAARIDDXXPLYKEALQMLRDAGAQVSIMTYDEFKHCWDTFVDHQGAPFQPWDGLDEHSQALSRRLRAILQNQGN

SEQ ID NO: 135 - protein, 191 aa, synthetic construct
  VARIANT 132: note = H, R, or K
  VARIANT 133: note = A, G, S, or T
MEASPASGPRHLMDPHIFYSNFNNRIGRHKTYLCYEVERLDNGTWVKMDQHRGFLHNQPRRHAELLFLDLVPSLQLDPAQIYRVTWFISWSPCFSWGCACEVRAFLQENTHVRLRIFCARIDDXXPLYKEALQMLRDAGAQVSIMTYDEFKHCWDTFVDHQGAPFQPWDGLDEHSQALSRRLRAILQNQGN

SEQ ID NO: 136 - protein, 189 aa, synthetic construct
  VARIANT 132: note = H, R, or K
  VARIANT 133: note = A, G, S, or T
MEASPASGPRHLMDPHIFYSNFNNRIGRHKTYLCYEVERLDNGTWVKMDQHRGFLHNQPRRHAELLFLDLVPSLQLDPAQIYRVTWFISWSPCFSCACEVRAFLQENTHVRLRIFAARIDDXXPLYKEALQMLRDAGAQVSIMTYDEFKHCWDTFVDHQGAPFQPWDGLDEHSQALSRRLRAILQNQGN

SEQ ID NO: 137 - protein, 199 aa, synthetic construct
MEASPASGPRHLMDPHIFTSNFNNGIGRHKTYLCYEVERLDNGTSVKMDQHRGFLHNQAKNLLCGFYGRHAELRFLDLVPSLQLDPAQIYRVTWFISWSPCFSWGCAGEVRAFLQENTHVRLRIFAARIYDYWPLYKEALQMLRDAGAQVSIMTYDEFKHCWDTFVDHQGCPFQPWDGLDEHSQALSGRLRAILQNQGN

SEQ ID NO: 138 - protein, 199 aa, synthetic construct
  VARIANT 130: note = A, G, F, H, Q, M, N, K, V, D, E, S, C, P or T
  VARIANT 132: note = R, H, K, or Q
MEASPASGPRHLMDPHIFTSNFNNGIGRHKTYLCYEVERLDNGTSVKMDQHRGFLHNQAKNLLCGFYGRHAELRFLDLVPSLQLDPAQIYRVTWFISWSPCFSWGCAGEVRAFLQENTHVRLRIFAARIXDXVPLYKEALQMLRDAGAQVSIMTYDEFKHCWDTFVDHQGCPFQPWDGLDEHSQALSGRLRAILQNQGN

SEQ ID NO: 139 - protein, 199 aa, synthetic construct; identical to SEQ ID NO: 102
  VARIANT 132: note = H, R, or K
  VARIANT 133: note = A, G, S, or T

SEQ ID NO: 140 - protein, 397 aa, synthetic construct
MNSNKDKIKVIKVFEAFAGIGSQFKALKNIARSKNWEIQHSGMVEWFVDAIVSYVAIHSKNFNPKIERLDRDILSISNDSKMPISEYGIKKINNTIKASYLNYAKKHFNNLFDIKKVNKDNFPKNIDIFTYSFPCQDLSVQGLQKGIDKELNTRSGLLWEIERILEEIKNSFSKEEMPKYLLMENVKNLLSHKNKKNYNTWLKQLEKFGYKSKTYLLNSKNFDNCQNRERVFCLSIRDDYLEKTGFKFKELEKVKNPPKKIKDILVDSSNYKYLNLNKYETTTFRETKSNIISRPLKNYTTFNSENYVYNINGIGPTLTASGANSRIKIETQQGVRYLTPLECFKYMQFDVNDFKKVQSTNLISENKMIYIAGNSIPVKILEAIFNTLEFVNNEELE

SEQ ID NO: 141 - protein, 397 aa, synthetic construct
MNSNKDKIKVIKVFEAFAGIGSQFKALKNIARSKNWEIQHSGMVEWFVDAIVSYVAIHSKNFNPKIERLDRDILSISNDSKMPISEYGIKKINNTIKASYLNYAKKHFNNLFDIKKVNKDNFPKNIDIFTYSFPCQDLSVQGLQKGIDKELNTRSGLLWEIERILEEIKNSFSKEEMPKYLLMENVKNLLSHKNKKNYNTWLKQLEKFGYKSKTYLLNSKNFDNCQNRERVFCLSIRDDYLEKTGFKFKELEKVKNPPKKIKDILVDSSNYKYLNLNKYETTTFRETKSNIISRPLKNYTTFNSENYVYNINGIGPTLTASGANSRIKIETQQGVRYLTPLECFKYMQFDVNDFKKVQSTNLISENKMIYIAGRSIPVKILEAIFNTLEFVNNEELE

SEQ ID NO: 142 - protein, 397 aa, synthetic construct
MNSNKDKIKVIKVFEAFAGIGSQFKALKNIARSKNWEIQHSGMVEWFVDAIVSYVAIHSKNFNPKIERLDRDILSISNDSKMPISEYGIKKINNTIKASYLNYAKKHFNNLFDIKKVNKDNFPKNIDIFTYSFPCQDLSVQGLQKGIDKELNTRSGLLWEIERILEEIKNSFSKEEMPKYLLMENVKNLLSHKNKKNYNTWLKQLEKFGYKSKTYLLNSKNFDNCQNRERVFCLSIRDDYLEKTGFKFKELEKVKNPPKKIKDILVDSSNYKYLNLNKYETTTFRETKSNIISRPLKNYTTFNSENYVYNINGIGPTLTASGANSRIKIETQQGVRYLTPLECFKYMQFDVNDFKKVQSTNLISENKMIYIAGKSIPVKILEAIFNTLEFVNNEELE

SEQ ID NO: 143 - protein, 472 aa, synthetic construct
MQENISVTDSYSTGNAAQAMLEKLLQIYDVKTLVAQLNGVGENHWSAAILKRALANDSAWHRLSEKEFAHLQTLLPKPPAHHPHYAFRFIDLFAGIGGIRRGFESIGGQCVFTSEWNKHAVRTYKANHYCDPATHHFNEDIRDITLSHKEGVSDEAAAEHIRQHIPEHDVLLAGFPCQPFSLAGVSKKNSLGRAHGFACDTQGTLFFDVVRIIDARRPAMFVLENVKNLKSHDQGKTFRIIMQTLDELGYDVADAEDNGPDDPKIIDGKHFLPQHRERIVLVGFRRDLNLKADFTLRDISECFPAQRVTLAQLLDPMVEAKYILTPVLWKYLYRYAKKHQARGNGFGYGMVYPNNPQSVTRTLSARYYKDGAEILIDRGWDMATGEKDFDDPLNQQHRPRRLTPRECARLMGFEAPGEAKFRIPVSDTQAYRQFGNSVVVPVFAAVAKLLEPKIKQAVALRQQEAQHGRRSR

SEQ ID NO: 144 - protein, 199 aa, synthetic construct
MEASPASGPRHLMDPHIFTSNFNNGIGRHKTYLCYEVERLDNGTSVKMDQHRGFLHNQAKNLLCGFYGRHAELRFLDLVPSLQLDPAQIYRVTWFISWSPCFSWGCAGEVRAFLQENTHVRLRIFAARIWDYDPLYKEALQMLRDAGAQVSIMTYDEFKHCWDTFVDHQGAPFQPWDGLDEHSQALSGRLRAILQNQGN

SEQ ID NO: 145 - protein, 199 aa, synthetic construct
MEASPASGPRHLMDPHIFTSNFNNGIGRHKTYLCYEVERLDNGTSVKMDQHRGFLHNQAKNLLCGFYGRHAELRFLDLVPSLQLDPAQIYRVTWFISWSPCFSWGCAGEVRAFLQENTHVRLRIFAARIWDYWPLYKEALQMLRDAGAQVSIMTYDEFKHCWDTFVDHQGCPFQPWDGLDEHSQALSGRLRAILQNQGN

SEQ ID NO: 146 - protein, 199 aa, synthetic construct
MEASPASGPRHLMDPHIFTSNFNNGIGRHKTYLCYEVERLDNGTSVKMDQHRGFLHNQAKNLLCGFYGRHAELLFLDLVPSLQLDPAQIYRVTWFISWSPCFSWGCAGEVRAFLQENTHVRLRIFAARIWDYWPLYKEALQMLRDAGAQVSIMTYDEFKHCWDTFVDHQGCPFQPWDGLDEHSQALSGRLRAILQNQGN

SEQ ID NO: 147 - protein, 199 aa, synthetic construct
MEASPASGPRHLMDPHIFYSNFNNGIGRHKTYLCYEVERLDNGTSVKMDQHRGFLHNQAKNLLCGFYGRHAELLFLDLVPSLQLDPAQIYRVTWFISWSPCFSWGCAGEVRAFLQENTHVRLRIFAARIWDYWPLYKEALQMLRDAGAQVSIMTYDEFKHCWDTFVDHQGCPFQPWDGLDEHSQALSGRLRAILQNQGN

SEQ ID NO: 148 - protein, 199 aa, synthetic construct
MEASPASGPRHLMDPHIFYSNFNNGIGRHKTYLCYEVERLDNGTSVKMDQHRGFLHNQAKNLLCGFYGRHAELLFLDLVPSLQLDPAQIYRVTWFISWSPCFSWGCAGEVRAFLQENTHVRLRIFAARIWDYWPLYKEALQMLRDAGAQVSIMTYDEFKHCWDTFVDHQGAPFQPWDGLDEHSQALSGRLRAILQNQGN

SEQ ID NO: 149 - protein, 199 aa, synthetic construct
MEASPASGPRHLMDPHTFYSNFNNRIGRHKTYLCYEVERLDNGTSVKMDQHRGFLHNQAKNLLCGFYGRHAELLFLDLVPSLQLDPAQIYRVTWFISWSPCFSWGCAGEVRAFLQENTHVRLRIFAARIWDYWPLYKEALQMLRDAGAQVSIMTYDEFKHCWDTFVDHQGAPFQPWDGLDEHSQALSGRLRAILQNQGN

SEQ ID NO: 150 - protein, 199 aa, synthetic construct
MEASPASGPRHLMDPHIFYSNFNNKIGRHKTYLCYEVERLDNGTWVKMDQHRGFLHNQAKNLLCGFYGRHAELLFLDLVPSLQLDPAQIYRVTWFISWSPCFSWGCAAEVRAFLQENTHVRLRIFAARIWDYWPLYKEALQMLRDAGAQVSIMTYDEFKHCWDTFVDHQGAPFQPWDGLDEHSQALSRRLRAILQNQGN

SEQ ID NO: 151 - protein, 191 aa, synthetic construct
MEASPASGPRHLMDPHTFYSNFNNKIGRHKTYLCYEVERLDNGTWVKMDQHRGFLHNQPRRHAELLFLDLVPSLQLDPAQIYRVTWFISWSPCFSWGCAAEVRAFLQENTHVRLRIFAARIWDYWPLYKEALQMLRDAGAQVSIMTYDEFKHCWDTFVDHQGAPFQPWDGLDEHSQALSRRLRAILQNQGN

SEQ ID NO: 152 - protein, 191 aa, synthetic construct
MEASPASGPRHLMDPHTFYSNFNNKIGRHKTYLCYEVERLDNGTWVKMDQHRGFLHNQPRRHAELLFLDLVPSLQLDPAQIYRVTWFISWSPCFSWGCAAEVRAFLQENTHVRLRIFCARIWDYWPLYKEALQMLRDAGAQVSIMTYDEFKHCWDTFVDHQGAPFQPWDGLDEHSQALSRRLRAILQNQGN

SEQ ID NO: 153 - protein, 189 aa, synthetic construct
MEASPASGPRHLMDPHTFYSNFNNKIGRHKTYLCYEVERLDNGTWVKMDQHRGFLHNQPRRHAELLFLDLVPSLQLDPAQIYRVTWFISWSPCFSCAAEVRAFLQENTHVRLRIFAARIWDYWPLYKEALQMLRDAGAQVSIMTYDEFKHCWDTFVDHQGAPFQPWDGLDEHSQALSRRLRAILQNQGN

SEQ ID NO: 154 - protein, 199 aa, synthetic construct
MEASPASGPRHLMDPHIFTSNFNNGIGRHKTYLCYEVERLDNGTSVKMDQHRGFLHNQAKNLLCGFYGRHAELRFLDLVPSLQLDPAQIYRVTWFISWSPCFSWGCAGEVRAFLQENTHVRLRIFAARIADHVPLYKEALQMLRDAGAQVSIMTYDEFKHCWDTFVDHQGCPFQPWDGLDEHSQALSGRLRAILQNQGN

SEQ ID NO: 155 - protein, 199 aa, synthetic construct
MEASPASGPRHLMDPHIFTSNFNNGIGRHKTYLCYEVERLDNGTSVKMDQHRGFLHNQAKNLLCGFYGRHAELLFLDLVPSLQLDPAQIYRVTWFISWSPCFSWGCAGEVRAFLQENTHVRLRIFAARIADHVPLYKEALQMLRDAGAQVSIMTYDEFKHCWDTFVDHQGCPFQPWDGLDEHSQALSGRLRAILQNQGN

SEQ ID NO: 156 - protein, 199 aa, synthetic construct
MEASPASGPRHLMDPHIFYSNFNNGIGRHKTYLCYEVERLDNGTSVKMDQHRGFLHNQAKNLLCGFYGRHAELLFLDLVPSLQLDPAQIYRVTWFISWSPCFSWGCAGEVRAFLQENTHVRLRIFAARIADHVPLYKEALQMLRDAGAQVSIMTYDEFKHCWDTFVDHQGCPFQPWDGLDEHSQALSGRLRAILQNQGN

SEQ ID NO: 157 - protein, 199 aa, synthetic construct
MEASPASGPRHLMDPHIFYSNFNNGIGRHKTYLCYEVERLDNGTSVKMDQHRGFLHNQAKNLLCGFYGRHAELLFLDLVPSLQLDPAQIYRVTWFISWSPCFSWGCAGEVRAFLQENTHVRLRIFAARIADHVPLYKEALQMLRDAGAQVSIMTYDEFKHCWDTFVDHQGAPFQPWDGLDEHSQALSGRLRAILQNQGN

SEQ ID NO: 158 - protein, 199 aa, synthetic construct
MEASPASGPRHLMDPHTFYSNFNNRIGRHKTYLCYEVERLDNGTSVKMDQHRGFLHNQAKNLLCGFYGRHAELLFLDLVPSLQLDPAQIYRVTWFISWSPCFSWGCAGEVRAFLQENTHVRLRIFAARIADHVPLYKEALQMLRDAGAQVSIMTYDEFKHCWDTFVDHQGAPFQPWDGLDEHSQALSGRLRAILQNQGN

SEQ ID NO: 159 - protein, 199 aa, synthetic construct
MEASPASGPRHLMDPHTFYSNFNNKIGRHKTYLCYEVERLDNGTWVKMDQHRGFLHNQAKNLLCGFYGRHAELLFLDLVPSLQLDPAQIYRVTWFISWSPCFSWGCAAEVRAFLQENTHVRLRIFAARIADHVPLYKEALQMLRDAGAQVSIMTYDEFKHCWDTFVDHQGAPFQPWDGLDEHSQALSRRLRAILQNQGN

SEQ ID NO: 160 - protein, 191 aa, synthetic construct
MEASPASGPRHLMDPHTFYSNFNNKIGRHKTYLCYEVERLDNGTWVKMDQHRGFLHNQPRRHAELLFLDLVPSLQLDPAQIYRVTWFISWSPCFSWGCAAEVRAFLQENTHVRLRIFAARIADHVPLYKEALQMLRDAGAQVSIMTYDEFKHCWDTFVDHQGAPFQPWDGLDEHSQALSRRLRAILQNQGN

SEQ ID NO: 161 - protein, 191 aa, synthetic construct
MEASPASGPRHLMDPHTFYSNFNNKIGRHKTYLCYEVERLDNGTWVKMDQHRGFLHNQPRRHAELLFLDLVPSLQLDPAQIYRVTWFISWSPCFSWGCAAEVRAFLQENTHVRLRIFCARIADHVPLYKEALQMLRDAGAQVSIMTYDEFKHCWDTFVDHQGAPFQPWDGLDEHSQALSRRLRAILQNQGN

SEQ ID NO: 162 - protein, 189 aa, synthetic construct
MEASPASGPRHLMDPHTFYSNFNNKIGRHKTYLCYEVERLDNGTWVKMDQHRGFLHNQPRRHAELLFLDLVPSLQLDPAQIYRVTWFISWSPCFSCAAEVRAFLQENTHVRLRIFAARIADHVPLYKEALQMLRDAGAQVSIMTYDEFKHCWDTFVDHQGAPFQPWDGLDEHSQALSRRLRAILQNQGN

SEQ ID NO: 163-195 - skipped (33 entries)

SEQ ID NO: 196 - protein, 199 aa, synthetic construct
  VARIANT 1..12: note = One or more may be removed
  VARIANT 11: note = H, P, R, L, or E
  VARIANT 12: note = L, W, or A
  VARIANT 14: note = D or Y
  VARIANT 16: note = H, L, W, or D
  VARIANT 17: note = I or T
  VARIANT 19: note = T, Y, I, L, F, or W
  VARIANT 20: note = S, F, W, Y, E, H, or I
  VARIANT 21: note = N, H, W, or Q
  VARIANT 25: note = G, R, L, V, A, D, or K
  VARIANT 26: note = I, R, L, A, or removed
  VARIANT 27: note = G, I, L, F, Y, R, C, or removed
  VARIANT 28: note = R or V
  VARIANT 29: note = H or R
  VARIANT 31: note = T, I, F, or W
  VARIANT 61..68: note = One or mroe may be removed
  VARIANT 34: note = C, L, I, V, or R
  VARIANT 38: note = E, W, or  Y
  VARIANT 39: note = R or L
  VARIANT 41: note = D or K
  VARIANT 42: note = N, G, or D
  VARIANT 45: note = S, T, W, or R
  VARIANT 47: note = K or P
  VARIANT 48: note = M, E, K, Q, S, L, D, or N
  VARIANT 51: note = H or L
  VARIANT 54: note = F or V
  VARIANT 56: note = H or R
  VARIANT 57: note = N or D
  VARIANT 59: note = P or L
  VARIANT 60: note = K, P, G, or R
  VARIANT 62: note = L or P
  VARIANT 72: note = E or A
  VARIANT 73: note = L or A
  VARIANT 74: note = R, N, L, C, or I
  VARIANT 77: note = D or R
  VARIANT 78: note = L or H
  VARIANT 79: note = V or L
  VARIANT 80: note = P, G, S, K, L, W, R, F, E, Y, D, H, Q, T, or V
  VARIANT 81: note = S or W
  VARIANT 85: note = D, I, or L
  VARIANT 87: note = A or R
  VARIANT 89: note = I, T, R, H, C, Q, S, or D
  VARIANT 90: note = Y or G
  VARIANT 91: note = R or L
  VARIANT 93: note = T or I
  VARIANT 94: note = W or L
  VARIANT 96: note = I or T
  VARIANT 97: note = S, L, or Y
  VARIANT 101: note = C or W
  VARIANT 102: note = F or N
  VARIANT 103: note = S, F, Y, H, R, W, L, M, K, T, I, D, Q, or C
  VARIANT 104: note = W, R, L, or removed
  VARIANT 105: note = G, S, L, W, Y, N, K, or removed
  VARIANT 106: note = C, I, T, S, or K
  VARIANT 107: note = A or F
  VARIANT 108: note = G, C, I, P, F, A, E, D, Q, Y, H, L, K, R, M, W, or S
  VARIANT 109: note = E, Q, W, L, or T
  VARIANT 110: note = V, L, or W
  VARIANT 111: note = R, A, V, E, or Q
  VARIANT 112: note = A, F, D, H, T, or Y
  VARIANT 114: note = L or G
  VARIANT 115: note = Q, K, L, W, M, Y, or C
  VARIANT 116: note = E, L, F, or V
  VARIANT 117: note = N, W, or Y
  VARIANT 118: note = T, W, P, N, or K
  VARIANT 119: note = H or W
  VARIANT 120: note = V, H, or N
  VARIANT 122: note = L or D
  VARIANT 123: note = R or H
  VARIANT 126: note = A, V, F, I, L, C, or S
  VARIANT 128: note = R or Y
  VARIANT 135: note = L, W, F, R, or Q
  VARIANT 136: note = Y or D
  VARIANT 138: note = E, W, R, Q, F, I, L, A, P, or M
  VARIANT 139: note = A, W, G, V, or Q
  VARIANT 141: note = Q or R
  VARIANT 142: note = M, T, A, R, W, or L
  VARIANT 145: note = D or R
  VARIANT 146: note = A, E, or G
  VARIANT 148: note = A, V, or L
  VARIANT 156: note = D, W, or P
  VARIANT 157: note = E or W
  VARIANT 159: note = K or R
  VARIANT 161: note = C, V, I, L, or M
  VARIANT 163: note = D or W
  VARIANT 164: note = T or I
  VARIANT 167: note = D or Y
  VARIANT 169: note = Q or R
  VARIANT 171: note = C, A, I, or R
  VARIANT 177: note = D or E
  VARIANT 180: note = D, W, E, or H
  VARIANT 182: note = H or N
  VARIANT 183: note = S, Y, F, W, or V
  VARIANT 184: note = Q or V
  VARIANT 185: note = A, H, I, F, or R
  VARIANT 186: note = L or W
  VARIANT 187: note = S, L, I, W, E, F, Y, or Q
  VARIANT 188: note = G, I, Y, Q, R, L, or A
  VARIANT 189: note = R or K
  VARIANT 192: note = A, R, W, I, L, K, or E
  VARIANT 195: note = Q or removed
  VARIANT 196: note = N or P
  VARIANT 197: note = Q or removed
  VARIANT 198: note = G or removed
  VARIANT 199: note = N or removed
MEASPASGPRXXMXPXXFXXXFNNXXXXXKXYLXYEVXXKXXGTXVXXDQXRGXLXXQXXNXLCGFXGRHAXXXFLXXXXXLQLXPXQXXXVXXFXXWSPXXXXXXXXXXXXFXXXXXXXRXXIFXAXIXDXXPXXKXXLXXLRXXGXQVSIMTYXXFXHXWXXFVXHXGXPFQPWXGLXEXXXXXXXXLRXILQXQGN

SEQ ID NO: 197 - protein, 199 aa, synthetic construct
  VARIANT 1..12: note = One or more can be removed
  VARIANT 11: note = H or L
  VARIANT 14: note = D or Y
  VARIANT 19: note = T, I, L, or Y
  VARIANT 16: note = H or D
  VARIANT 17: note = I or T
  VARIANT 20: note = S, E, F, I, or Y
  VARIANT 25: note = G, R, K, or V
  VARIANT 26: note = I or R
  VARIANT 31: note = T, I, or W
  VARIANT 61..68: note = One or more may be removed
  VARIANT 45: note = S, W, or R
  VARIANT 47: note = K or P
  VARIANT 48: note = M, E, K, Q, S, L, D, or N
  VARIANT 51: note = H or L
  VARIANT 59: note = A or P
  VARIANT 60: note = K, G, or R
  VARIANT 62: note = L or P
  VARIANT 72: note = E or A
  VARIANT 74: note = R or L
  VARIANT 78: note = L or H
  VARIANT 80: note = P, G, R, S, or T
  VARIANT 89: note = I, H, R, or T
  VARIANT 103: note = S, R, T, or Y
  VARIANT 104: note = W or removed
  VARIANT 105: note = G or removed
  VARIANT 108: note = G, Y, C, or A
  VARIANT 109: note = E, L, or Q
  VARIANT 110: note = V or L
  VARIANT 115: note = Q, K, or Y
  VARIANT 116: note = E or L
  VARIANT 118: note = T or P
  VARIANT 123: note = R or H
  VARIANT 126: note = A, F, or C
  VARIANT 138: note = E, A, or R
  VARIANT 145: note = D or R
  VARIANT 161: note = C or M
  VARIANT 171: note = C or A
  VARIANT 180: note = D, H, or W
  VARIANT 183: note = S, F, V, or W
  VARIANT 185: note = A, I, or R
  VARIANT 188: note = G, R, I, Y, or Q
  VARIANT 189: note = R or K
  VARIANT 195..199: note = One or more may be removed
MEASPASGPRXLMXPXXFXXNFNNXXGRHKXYLCYEVERKDNGTXVXXDQXRGFLHNQXXNXLCGFYGRHAXLXFLDXVXSLQLDPAQXYRVTWFISWSPCFXWGCAXXXRAFLXXNXHVRLXIFXARIXDXXPLYKXALQMLRXAGAQVSIMTYDEFKHXWDTFVDHQGXPFQPWDGLXEHXQXLSXXLRAILQNQGN

SEQ ID NO: 198 - protein, 199 aa, synthetic construct; identical to SEQ ID NO: 196
  VARIANT 130: note = F, L, I, or Y
  VARIANT 132: note = Y or H
  VARIANT 133: note = D or W
  VARIANT 1..129: note = Same variant identities as corresponding identities in SEQ ID NO:196
  VARIANT 134..199: note = Same variant identities as corresponding identities in SEQ ID NO:196

SEQ ID NO: 199 - protein, 199 aa, synthetic construct; identical to SEQ ID NO: 197
  VARIANT 130: note = F, L, I, or Y
  VARIANT 132: note = Y or H
  VARIANT 133: note = D or W
  VARIANT 1..129: note = Same variant identities as corresponding identities in SEQ ID NO:197
  VARIANT 134..199: note = Same variant identities as corresponding identities in SEQ ID NO:197

SEQ ID NO: 200 - protein, 199 aa, synthetic construct; identical to SEQ ID NO: 196
  VARIANT 130: note = A, G, F, H, W, M, N, K, V, D, S, E, C, P, T, Y, or L
  VARIANT 132: note = R, H, K, Q, or Y
  VARIANT 133: note = W, C, D, A, G, S, T, or V
  VARIANT 1..129: note = Same variant identities as corresponding identities in SEQ ID NO:196
  VARIANT 134..199: note = Same variant identities as corresponding identities in SEQ ID NO:196

SEQ ID NO: 201 - protein, 199 aa, synthetic construct; identical to SEQ ID NO: 196
  VARIANT 130: note = A, G, F, H, W, M, N, K, V, D, S, E, C, P, or T
  VARIANT 132: note = R, H, K, or Q
  VARIANT 133: note = W or C
  VARIANT 1..129: note = Same variant identities as corresponding identities in SEQ ID NO:196
  VARIANT 134..199: note = Same variant identities as corresponding identities in SEQ ID NO:196

SEQ ID NO: 202 - protein, 199 aa, synthetic construct
  VARIANT 1..129: note = Same variant identities as corresponding identities in SEQ ID NO:196
  VARIANT 134..199: note = Same variant identities as corresponding identities in SEQ ID NO:196
MEASPASGPRXXMXPXXFXXXFNNXXXXXKXYLXYEVXXKXXGTXVXXDQXRGXLXXQXXNXLCGFXGRHAXXXFLXXXXXLQLXPXQXXXVXXFXXWSPXXXXXXXXXXXXFXXXXXXXRXXIFXAXIADHVPXXKXXLXXLRXXGXQVSIMTYXXFXHXWXXFVXHXGXPFQPWXGLXEXXXXXXXXLRXILQXQGN

SEQ ID NO: 203 - protein, 199 aa, synthetic construct
  VARIANT 132: note = R, H, or K
  VARIANT 133: note = A, G, S, or T
  VARIANT 1..129: note = Same variant identities as corresponding identities in SEQ ID NO:196
  VARIANT 134..199: note = Same variant identities as corresponding identities in SEQ ID NO:196
MEASPASGPRXXMXPXXFXXXFNNXXXXXKXYLXYEVXXKXXGTXVXXDQXRGXLXXQXXNXLCGFXGRHAXXXFLXXXXXLQLXPXQXXXVXXFXXWSPXXXXXXXXXXXXFXXXXXXXRXXIFXAXIDDXXPXXKXXLXXLRXXGXQVSIMTYXXFXHXWXXFVXHXGXPFQPWXGLXEXXXXXXXXLRXILQXQGN

SEQ ID NO: 204 - protein, 199 aa, synthetic construct; identical to SEQ ID NO: 197
  VARIANT 130: note = A, G, F, H, W, M, N, K, V, D, S, E, C, P, T, Y, or L
  VARIANT 132: note = R, H, K, Q, or Y
  VARIANT 133: note = W, C, D, A, G, S, T, or V
  VARIANT 1..129: note = Same variant identities as corresponding identities in SEQ ID NO:197
  VARIANT 134..199: note = Same variant identities as corresponding identities in SEQ ID NO:197

SEQ ID NO: 205 - protein, 199 aa, synthetic construct; identical to SEQ ID NO: 197
  VARIANT 130: note = A, G, F, H, W, M, N, K, V, D, S, E, C, P, or T
  VARIANT 132: note = R, H, K, or Q
  VARIANT 133: note = W or C
  VARIANT 1..129: note = Same variant identities as corresponding identities in SEQ ID NO:197
  VARIANT 134..199: note = Same variant identities as corresponding identities in SEQ ID NO:197

SEQ ID NO: 206 - protein, 199 aa, synthetic construct
  VARIANT 1..129: note = Same variant identities as corresponding identities in SEQ ID NO:197
  VARIANT 134..199: note = Same variant identities as corresponding identities in SEQ ID NO:197
MEASPASGPRXLMXPXXFXXNFNNXXGRHKXYLCYEVERKDNGTXVXXDQXRGFLHNQXXNXLCGFYGRHAXLXFLDXVXSLQLDPAQXYRVTWFISWSPCFXWGCAXXXRAFLXXNXHVRLXIFXARIADHVPLYKXALQMLRXAGAQVSIMTYDEFKHXWDTFVDHQGXPFQPWDGLXEHXQXLSXXLRAILQNQGN

SEQ ID NO: 207 - protein, 199 aa, synthetic construct
  VARIANT 132: note = R, H, or K
  VARIANT 133: note = A, G, S, or T
  VARIANT 1..129: note = Same variant identities as corresponding identities in SEQ ID NO:197
  VARIANT 134..199: note = Same variant identities as corresponding identities in SEQ ID NO:197
MEASPASGPRXLMXPXXFXXNFNNXXGRHKXYLCYEVERKDNGTXVXXDQXRGFLHNQXXNXLCGFYGRHAXLXFLDXVXSLQLDPAQXYRVTWFISWSPCFXWGCAXXXRAFLXXNXHVRLXIFXARIDDXXPLYKXALQMLRXAGAQVSIMTYDEFKHXWDTFVDHQGXPFQPWDGLXEHXQXLSXXLRAILQNQGN

SEQ ID NO: 208 - protein, 199 aa, synthetic construct; identical to SEQ ID NO: 196
  VARIANT 130: note = Y, A, G, F, H, W, M, N, K, V, D, S, E, C, P, or T
  VARIANT 132: note = Y, R, H, K, or Q
  VARIANT 133: note = D, W, or C
  VARIANT 1..129: note = Same variant identities as corresponding identities in SEQ ID NO:196
  VARIANT 134..199: note = Same variant identities as corresponding identities in SEQ ID NO:196

SEQ ID NO: 209 - protein, 199 aa, synthetic construct
  VARIANT 1..129: note = Same variant identities as corresponding identities in SEQ ID NO:196
  VARIANT 134..199: note = Same variant identities as corresponding identities in SEQ ID NO:196
MEASPASGPRXXMXPXXFXXXFNNXXXXXKXYLXYEVXXKXXGTXVXXDQXRGXLXXQXXNXLCGFXGRHAXXXFLXXXXXLQLXPXQXXXVXXFXXWSPXXXXXXXXXXXXFXXXXXXXRXXIFXAXIYDYDPXXKXXLXXLRXXGXQVSIMTYXXFXHXWXXFVXHXGXPFQPWXGLXEXXXXXXXXLRXILQXQGN

SEQ ID NO: 210 - protein, 199 aa, synthetic construct; identical to SEQ ID NO: 197
  VARIANT 130: note = Y, A, G, F, H, W, M, N, K, V, D, S, E, C, P, or T
  VARIANT 132: note = Y, R, H, K, or Q
  VARIANT 133: note = D, W, or C
  VARIANT 1..129: note = Same variant identities as corresponding identities in SEQ ID NO:197
  VARIANT 134..199: note = Same variant identities as corresponding identities in SEQ ID NO:197

SEQ ID NO: 211 - protein, 199 aa, synthetic construct
  VARIANT 1..129: note = Same variant identities as corresponding identities in SEQ ID NO:197
  VARIANT 134..199: note = Same variant identities as corresponding identities in SEQ ID NO:197
MEASPASGPRXLMXPXXFXXNFNNXXGRHKXYLCYEVERKDNGTXVXXDQXRGFLHNQXXNXLCGFYGRHAXLXFLDXVXSLQLDPAQXYRVTWFISWSPCFXWGCAXXXRAFLXXNXHVRLXIFXARIYDYDPLYKXALQMLRXAGAQVSIMTYDEFKHXWDTFVDHQGXPFQPWDGLXEHXQXLSXXLRAILQNQGN

SEQ ID NO: 212 - protein, 15 aa, synthetic construct
GLNDIFEAQKIEWHE

SEQ ID NO: 213 - protein, 437 aa, synthetic construct
MEASPASGPRHLMDPHIFTSNFNNGIGRHKTYLCYEVERLDNGTSVKMDQHRGFLHNQAKNLLCGFYGRHAALLFLDLVPSLQLDPAQIYRVTWFISWSPCFSWGCAGEVRAFLQENTHVRLRIFAARIADHWPLYKEALQMLRDAGAQVSIMTYDEFKHCWDTFVDHQGCPFQPWDGLDEHSQALSGRLRAILQNQGNSGGSSGGSSGSETPGTSESATPESSGGSSGGSEASPASGPRHLMDPHIFTSNFNNGIGRHKTYLCYEVERLDNGTSVKMDQHRGFLHNQAKNLLCGFYGRHAELLFLDLVPSLQLDPAQIYRVTWFISWSPCFSWGCAGEVRAFLQENTHVRLRIFAARIADHWPLYKEALQMLRDAGAQVSIMTYDEFKHCWDTFVDHQGCPFQPWDGLDEHSQALSGRLRAILQNQGNLEHHHHHH

SEQ ID NO: 214 - protein, 437 aa, synthetic construct
MEASPASGPRHLMDPHIFTSNFNNGIGRHKTYLCYEVERLDNGTSVKMDQHRGFLHNQAKNLLCGFYGRHAELLFLDLVPSLQLDPAQIYRVTWFISWSPCFSWGCAGEVRAFLQENTHVRLRIFAARIADHWPLYKEALQMLRDAGAQVSIMTYDEFKHCWDTFVDHQGCPFQPWDGLDEHSQALSGRLRAILQNQGNSGGSSGGSSGSETPGTSESATPESSGGSSGGSEASPASGPRHLMDPHIFTSNFNNGIGRHKTYLCYEVERLDNGTSVKMDQHRGFLHNQAKNLLCGFYGRHAALLFLDLVPSLQLDPAQIYRVTWFISWSPCFSWGCAGEVRAFLQENTHVRLRIFAARIADHWPLYKEALQMLRDAGAQVSIMTYDEFKHCWDTFVDHQGCPFQPWDGLDEHSQALSGRLRAILQNQGNLEHHHHHH

SEQ ID NO: 215 - protein, 199 aa, synthetic construct; identical to SEQ ID NO: 156

SEQ ID NO: 216 - protein, 199 aa, synthetic construct; identical to SEQ ID NO: 196
  VARIANT 130: note = Y, A, F, L, or W
  VARIANT 132: note = Y or H
  VARIANT 133: note = D or W
  VARIANT 1..129: note = Same variant identities as corresponding identities in SEQ ID NO:196
  VARIANT 134..199: note = Same variant identities as corresponding identities in SEQ ID NO:196

SEQ ID NO: 217 - protein, 199 aa, synthetic construct; identical to SEQ ID NO: 197
  VARIANT 130: note = Y, A, F, L or W
  VARIANT 132: note = Y or H
  VARIANT 133: note = D or W
  VARIANT 1..129: note = Same variant identities as corresponding identities in SEQ ID NO:197
  VARIANT 134..199: note = Same variant identities as corresponding identities in SEQ ID NO:197

SEQ ID NO: 218 - protein, 8 aa, synthetic construct
DYKDDDDK

SEQ ID NO: 219 - protein, 5 aa, synthetic construct
GGSGG

SEQ ID NO: 220 - protein, 6 aa, synthetic construct
HHHHHH

SEQ ID NO: 221 - protein, 429 aa, synthetic construct
MEASPASGPRHLMDPHIFYSNFNNGIGRHKTYLCYEVERLDNGTSVKMDQHRGFLHNQAKNLLCGFYGRHAALLFLDLVPSLQLDPAQIYRVTWFISWSPCFSWGCAGEVRAFLQENTHVRLRIFAARIADHWPLYKEALQMLRDAGAQVSIMTYDEFKHCWDTFVDHQGAPFQPWDGLDEHSQALSGRLRAILQNQGNSGGSSGGSSGSETPGTSESATPESSGGSSGGSEASPASGPRHLMDPHIFYSNFNNGIGRHKTYLCYEVERLDNGTSVKMDQHRGFLHNQAKNLLCGFYGRHAALLFLDLVPSLQLDPAQIYRVTWFISWSPCFSWGCAGEVRAFLQENTHVRLRIFAARIADHWPLYKEALQMLRDAGAQVSIMTYDEFKHCWDTFVDHQGAPFQPWDGLDEHSQALSGRLRAILQNQGN

SEQ ID NO: 222 - protein, 429 aa, synthetic construct
MEASPASGPRHLMDPHTFYSNFNNRIGRHKTYLCYEVERLDNGTSVKMDQHRGFLHNQAKNLLCGFYGRHAELLFLDLVPSLQLDPAQIYRVTWFISWSPCFSWGCAGEVRAFLQENTHVRLRIFAARIADHWPLYKEALQMLRDAGAQVSIMTYDEFKHCWDTFVDHQGAPFQPWDGLDEHSQALSGRLRAILQNQGNSGGSSGGSSGSETPGTSESATPESSGGSSGGSEASPASGPRHLMDPHTFYSNFNNRIGRHKTYLCYEVERLDNGTSVKMDQHRGFLHNQAKNLLCGFYGRHAELLFLDLVPSLQLDPAQIYRVTWFISWSPCFSWGCAGEVRAFLQENTHVRLRIFAARIADHWPLYKEALQMLRDAGAQVSIMTYDEFKHCWDTFVDHQGAPFQPWDGLDEHSQALSGRLRAILQNQGN

SEQ ID NO: 223 - protein, 61 aa, synthetic construct
MEASPASGPRHLMDPHTFYSNFNNRIGRHKTYLCYEVERLDNGTSVKMDQHRGFLHNQAKN

SEQ ID NO: 224 - protein, 61 aa, synthetic construct
MEASPASGPRHLMDPHIFYSNFNNKIGRHKTYLCYEVERLDNGTWVKMDQHRGFLHNQAKN

SEQ ID NO: 225 - protein, 413 aa, synthetic construct
MEASPASGPRHLMDPHTFYSNFNNKIGRHKTYLCYEVERLDNGTWVKMDQHRGFLHNQPRRHAELLFLDLVPSLQLDPAQIYRVTWFISWSPCFSWGCACEVRAFLQENTHVRLRIFAARIADHWPLYKEALQMLRDAGAQVSIMTYDEFKHCWDTFVDHQGAPFQPWDGLDEHSQALSRRLRAILQNQGNSGGSSGGSSGSETPGTSESATPESSGGSSGGSEASPASGPRHLMDPHTFYSNFNNKIGRHKTYLCYEVERLDNGTWVKMDQHRGFLHNQPRRHAELLFLDLVPSLQLDPAQIYRVTWFISWSPCFSWGCACEVRAFLQENTHVRLRIFAARIADHWPLYKEALQMLRDAGAQVSIMTYDEFKHCWDTFVDHQGAPFQPWDGLDEHSQALSRRLRAILQNQGN

SEQ ID NO: 226 - protein, 13 aa, synthetic construct
AHIVMVDAYKPTK

SEQ ID NO: 227 - protein, 116 aa, synthetic construct
GAMVDTLSGLSSEQGQSGDMTIEEDSATHIKFSKRDEDGKELAGATMELRDSSGKTISTWISDGQVKDFYLYPGKYTFVETAAPDGYEVATAITFTVNEQGQVTVNGKATKGDAHI

SEQ ID NO: 228 - protein, 12 aa, synthetic construct
KLGDIEFIKVNK

SEQ ID NO: 229 - protein, 112 aa, synthetic construct
KPLRGAVFSLQKQHPDYPDIYGAIDQNGTYQNVRTGEDGKLTFKNLSDGKYRLFENSEPAGYKPVQNKPIVAFQIVNGEVRDVTSIVPQDIPATYEFTNGKHYITNEPIPPK

SEQ ID NO: 230 - protein, 214 aa, synthetic construct
MSKGEELFTGVVPILVELDGDVNGHKFSVRGEGEGDATIGKLTLKFICTTGKLPVPWPTLVTTLTYGVQCFSRYPDHMKRHDFFKSAMPEGYVQERTISFKDDGKYKTRAVVKFEGDTLVNRIELKGTDFKEDGNILGHKLEYNFNSHNVYITADKQKNGIKANFTVRHNVEDGSVQLADHYQQNTPIGDGPVLLPDNHYLSTQTVLSKDPNEK

SEQ ID NO: 231 - protein, 16 aa, synthetic construct
RDHMVLHEYVNAAGIT

SEQ ID NO: 232 - protein, 165 aa, synthetic construct
MVFTLEDFVGDWEQTAAYNLDQVLEQGGVSSLLQNLAVSVTPIQRIVRSGENALKIDIHVIIPYEGLSADQMAQIEEVFKVVYPVDDHHFKVILPYGTLVIDGVTPNMLNYFGRPYEGIAVFDGKKITVTGTLWNGNKIIDERLITPDGSMLFRVTINSHHHHHH

SEQ ID NO: 233 - protein, 11 aa, synthetic construct
VSGWRLFKKIS

SEQ ID NO: 234 - protein, 33 aa, synthetic construct
HMKQLEDKVEELLSKNYHLENEVARLKKLVGER

SEQ ID NO: 235 - protein, 10 aa, synthetic construct
GSPGSSSSGS

SEQ ID NO: 236 - protein, 16 aa, synthetic construct
DPGGGGSGGGGSNPGS

SEQ ID NO: 237 - protein, 16 aa, synthetic construct
GGGGSGGGGSGSDPGS

SEQ ID NO: 238 - protein, 16 aa, synthetic construct
DPGSGGGGSGGGGSGS

SEQ ID NO: 239 - protein, 19 aa, synthetic construct
GGGGSGGGGSGGGGSDPGS

SEQ ID NO: 240 - protein, 19 aa, synthetic construct
DPGSGGGGSGGGGSGGGGS

SEQ ID NO: 241 - protein, 17 aa, synthetic construct
DPGSGSVPLGSGSNPGS

SEQ ID NO: 242 - protein, 19 aa, synthetic construct
DPGSGGSVPLGSGGSNPGS

SEQ ID NO: 243 - protein, 20 aa, synthetic construct
DPGVLEREDKPTTSKPNPGS

SEQ ID NO: 244 - protein, 20 aa, synthetic construct
DPGVLEREDVPTTSYPNPGS

SEQ ID NO: 245 - protein, 20 aa, synthetic construct
DPGVLEREDKVTTSKYNPGS

SEQ ID NO: 246 - protein, 18 aa, synthetic construct
DPVLEREDKVTTSKNPGS

SEQ ID NO: 247 - protein, 7 aa, synthetic construct
DIEGRMD

SEQ ID NO: 248 - protein, 15 aa, synthetic construct
GEGKSSGSGSESKAS

SEQ ID NO: 249 - protein, 18 aa, synthetic construct
GSTSGSGKPGSGEGSTKG

SEQ ID NO: 250 - protein, 10 aa, synthetic construct
SGGGGSGGGG

SEQ ID NO: 251 - protein, 14 aa, synthetic construct
GGGGSGGGGSGGGG

SEQ ID NO: 252 - protein, 11 aa, synthetic construct
AEAAAKEAAAK

SEQ ID NO: 253 - protein, 20 aa, synthetic construct
GGGGSGGGGSGGGGSGGGGS

SEQ ID NO: 254 - protein, 8 aa, synthetic construct
GSGSGNGS

SEQ ID NO: 255 - protein, 8 aa, synthetic construct
GGSGSGSG

SEQ ID NO: 256 - protein, 6 aa, synthetic construct
GGSGSG

SEQ ID NO: 257 - protein, 8 aa, synthetic construct
GGSGNGSG

SEQ ID NO: 258 - protein, 8 aa, synthetic construct
GGNGSGSG

SEQ ID NO: 259 - protein, 57 aa, synthetic construct
GGNGSGAEAAAKEAAAKEAAAKEAAAKALEAEAAAKEAAAKEAAAKEAAAKAEAAAK

SEQ ID NO: 260 - protein, 6 aa, synthetic construct
GGSGGS

SEQ ID NO: 261 - protein, 5 aa, synthetic construct
GGGGS

SEQ ID NO: 262 - protein, 5 aa, synthetic construct
SGGGG

SEQ ID NO: 263 - protein, 9 aa, synthetic construct
GGGGSGGGG

SEQ ID NO: 264 - protein, 13 aa, synthetic construct
EGKSSGSGESKST

SEQ ID NO: 265 - protein, 15 aa, synthetic construct
GLNDIFEAQKIEWHE

SEQ ID NO: 266 - protein, 33 aa, synthetic construct
DSGGSSGGSSGSETPGTSESATPESSGGSSGGS

SEQ ID NO: 267 - protein, 10 aa, synthetic construct
GGGGSGGGGS

SEQ ID NO: 268 - protein, 18 aa, synthetic construct
KESGSVSSEQLAQFRSLD

SEQ ID NO: 269 - protein, 12 aa, synthetic construct
GSAGSAAGSGEF

SEQ ID NO: 270 - protein, 5 aa, synthetic construct
EAAAK

SEQ ID NO: 271 - protein, 199 aa, synthetic construct
MEASPASGPRHLMDPHIFTSNFNNGIGRHKTYLCYEVERLDNGTSVKMDQHRGFLHNQAKNLLCGFYGRHAELRFLDLVPSLQLDPAQIYRVTWFISWSPCFSWGCAGEVRAFLQENTHVRLRIFAARIADHVPLYKEALQMLRDAGAQVSIMTYDEFKHCWDTFVDHQGAPFQPWDGLDEHSQALSGRLRAILQNQGN

SEQ ID NO: 272 - protein, 199 aa, synthetic construct; identical to SEQ ID NO: 154

SEQ ID NO: 273 - protein, 199 aa, synthetic construct; identical to SEQ ID NO: 155

SEQ ID NO: 274 - protein, 199 aa, synthetic construct; identical to SEQ ID NO: 156

SEQ ID NO: 275 - protein, 199 aa, synthetic construct; identical to SEQ ID NO: 157

SEQ ID NO: 276 - protein, 199 aa, synthetic construct; identical to SEQ ID NO: 158

SEQ ID NO: 277 - protein, 199 aa, synthetic construct; identical to SEQ ID NO: 158

SEQ ID NO: 278 - protein, 191 aa, synthetic construct
MEASPASGPRHLMDPHTFYSNFNNKIGRHKTYLCYEVERLDNGTWVKMDQHRGFLHNQPRRHAELLFLDLVPSLQLDPAQIYRVTWFISWSPCFSWGCACEVRAFLQENTHVRLRIFAARIADHVPLYKEALQMLRDAGAQVSIMTYDEFKHCWDTFVDHQGAPFQPWDGLDEHSQALSRRLRAILQNQGN

SEQ ID NO: 279 - protein, 191 aa, synthetic construct; identical to SEQ ID NO: 119

SEQ ID NO: 280 - protein, 189 aa, synthetic construct
MEASPASGPRHLMDPHTFYSNFNNKIGRHKTYLCYEVERLDNGTWVKMDQHRGFLHNQPRRHAELLFLDLVPSLQLDPAQIYRVTWFISWSPCFSCACEVRAFLQENTHVRLRIFAARIADHVPLYKEALQMLRDAGAQVSIMTYDEFKHCWDTFVDHQGAPFQPWDGLDEHSQALSRRLRAILQNQGN

SEQ ID NO: 281 - protein, 191 aa, synthetic construct
  VARIANT 121: note = A, G, F, H, Q, M, N, K, V, D, E, S, C, P, or T
  VARIANT 123: note = R, H, L, or Q
MEASPASGPRHLMDPHTFYSNFNNKIGRHKTYLCYEVERLDNGTWVKMDQHRGFLHNQPRRHAELLFLDLVPSLQLDPAQIYRVTWFISWSPCFSWGCACEVRAFLQENTHVRLRIFAARIXDXWPLYKEALQMLRDAGAQVSIMTYDEFKHCWDTFVDHQGAPFQPWDGLDEHSQALSRRLRAILQNQGN

SEQ ID NO: 282 - protein, 191 aa, synthetic construct
  VARIANT 121: note = A or S
MEASPASGPRHLMDPHTFYSNFNNKIGRHKTYLCYEVERLDNGTWVKMDQHRGFLHNQPRRHAELLFLDLVPSLQLDPAQIYRVTWFISWSPCFSWGCACEVRAFLQENTHVRLRIFAARIXDHWPLYKEALQMLRDAGAQVSIMTYDEFKHCWDTFVDHQGAPFQPWDGLDEHSQALSRRLRAILQNQGN

SEQ ID NO: 283 - protein, 191 aa, synthetic construct
  VARIANT 121: note = A, G, F, H, Q, M, N, K, V, D, E, S, C, P, or T
  VARIANT 123: note = R, H, L, or Q
MEASPASGPRHLMDPHTFYSNFNNKIGRHKTYLCYEVERLDNGTWVKMDQHRGFLHNQPRRHAALLFLDLVPSLQLDPAQIYRVTWFISWSPCFSWGCACEVRAFLQENTHVRLRIFAARIXDXWPLYKEALQMLRDAGAQVSIMTYDEFKHCWDTFVDHQGAPFQPWDGLDEHSQALSRRLRAILQNQGN

SEQ ID NO: 284 - protein, 191 aa, synthetic construct
  VARIANT 121: note = A or S
MEASPASGPRHLMDPHTFYSNFNNKIGRHKTYLCYEVERLDNGTWVKMDQHRGFLHNQPRRHAALLFLDLVPSLQLDPAQIYRVTWFISWSPCFSWGCACEVRAFLQENTHVRLRIFAARIXDHWPLYKEALQMLRDAGAQVSIMTYDEFKHCWDTFVDHQGAPFQPWDGLDEHSQALSRRLRAILQNQGN

SEQ ID NO: 285-299 - skipped (15 entries)

SEQ ID NO: 300 - protein, 207 aa, synthetic construct
MEASPASGPRHLMDPHIFTSNFNNGIGRHKTYLCYEVERLDNGTSVKMDQHRGFLHNQAKNLLCGFYGRHAQLRFLDLVPSLQLDPAQIYRVTWFISWSPCFSWGCAGEVRAFLQENTHVRLRIFAARIADYDPLYKEALQMLRDAGAQVSIMTYDEFKHCWDTFVDHQGAPFQPWDGLDEHSQALSGRLRAILQNQGNLEHHHHHH

SEQ ID NO: 301 - protein, 207 aa, synthetic construct
MEASPASGPRHLMDPHIFTSNFNNGIGRHKTYLCYEVERLDNGTSVKMDQHRGFLHNQAKNLLCGFYGRHAQLRFLDLVPSLQLDPAQIYRVTWFISWSPCFSWGCAGEVRAFLQENTHVRLRIFAARIADHDPLYKEALQMLRDAGAQVSIMTYDEFKHCWDTFVDHQGAPFQPWDGLDEHSQALSGRLRAILQNQGNLEHHHHHH

SEQ ID NO: 302 - protein, 207 aa, synthetic construct
MEASPASGPRHLMDPHIFTSNFNNGIGRHKTYLCYEVERLDNGTSVKMDQHRGFLHNQAKNLLCGFYGRHAALRFLDLVPSLQLDPAQIYRVTWFISWSPCFSWGCAGEVRAFLQENTHVRLRIFAARIADYDPLYKEALQMLRDAGAQVSIMTYDEFKHCWDTFVDHQGAPFQPWDGLDEHSQALSGRLRAILQNQGNLEHHHHHH

SEQ ID NO: 303 - protein, 207 aa, synthetic construct
MEASPASGPRHLMDPHIFTSNFNNGIGRHKTYLCYEVERLDNGTSVKMDQHRGFLHNQAKNLLCGFYGRHAALRFLDLVPSLQLDPAQIYRVTWFISWSPCFSWGCAGEVRAFLQENTHVRLRIFAARIADHDPLYKEALQMLRDAGAQVSIMTYDEFKHCWDTFVDHQGAPFQPWDGLDEHSQALSGRLRAILQNQGNLEHHHHHH

SEQ ID NO: 304 - protein, 207 aa, synthetic construct
MEASPASGPRHLMDPHIFTSNFNNGIGRHKTYLCYEVERLDNGTSVKMDQHRGFLHNQAKNLLCGFYGRHAQLRFLDLVPSLQLDPAQIYRVTWFISWSPCFSWGCAGEVRAFLQENTHVRLRIFAARIYDYDPLYKEALQMLRDAGAQVSIMTYDEFKHCWDTFVDHQGAPFQPWDGLDEHSQALSGRLRAILQNQGNLEHHHHHH

SEQ ID NO: 305 - protein, 207 aa, synthetic construct
MEASPASGPRHLMDPHIFTSNFNNGIGRHKTYLCYEVERLDNGTSVKMDQHRGFLHNQAKNLLCGFYGRHAALRFLDLVPSLQLDPAQIYRVTWFISWSPCFSWGCAGEVRAFLQENTHVRLRIFAARIYDYDPLYKEALQMLRDAGAQVSIMTYDEFKHCWDTFVDHQGAPFQPWDGLDEHSQALSGRLRAILQNQGNLEHHHHHH

SEQ ID NO: 306 - protein, 199 aa, synthetic construct
MEASPASGPRHLMDPHIFYSNFNNGIGRHKTYLCYEVERLDNGTSVKMDQHRGFLHNQAKNLLCGFYGRHAELLFLDLVPSLQLDPAQIYRVTWFISWSPCFSWGTAGEVRAFLQENTHVRLRIFAARIADHWPLYKEALQMLRDAGAQVSIMTYDEFKHCWDTFVDHQGAPFQPWDGLDEHSQALSGRLRAILQNQGN

SEQ ID NO: 307 - skipped

SEQ ID NO: 308 - protein, 199 aa, synthetic construct
MEASPASGPRHLMDPHIFTSNFNNGIGRHKTYLCYEVERLDNGTSVKMDQHRGFLHNQAKNLLCGFYGRHAALRFLDLVPSLQLDPAQIYRVTWFISWSPCFSWGCAGEVRAFLQENTHVRLRIFAARIADEWPLYKEALQMLRDAGAQVSIMTYDEFKHCWDTFVDHQGCPFQPWDGLDEHSQALSGRLRAILQNQGN

SEQ ID NO: 309 - protein, 191 aa, synthetic construct
MEASPASGPRHLMDPHTFYSNFNNKIGRHKTYLCYEVERLDNGTWVKMDQHRGFLHNQPRRHAELLFLDLVPSLQLDPAQIYRVTWFISWSPCFSWGKACEVRAFLQENTHVRLRIFAARIADHWPLYKEALQMLRDAGAQVSIMTYDEFKHCWDTFVDHQGAPFQPWDGLDEHSQALSRRLRAILQNQGN

SEQ ID NO: 310 - protein, 207 aa, synthetic construct
MEASPASGPRHLMDPHIFTSNFNNGIGRHKTYLCYEVERLDNGTSVKMDQHRGFLHNQAKNLLCGFYGRHAELRFLDLVPSLQLDPAQIYRVTWFISWSPCFSWGCAGEVRAFLQENTHVRLRIFAARIYDPDPLYKEALQMLRDAGAQVSIMTYDEFKHCWDTFVDHQGCPFQPWDGLDEHSQALSGRLRAILQNQGNLEHHHHHH

SEQ ID NO: 311 - protein, 207 aa, synthetic construct
MEASPASGPRHLMDPHIFTSNFNNGIGRHKTYLCYEVERLDNGTSVKMDQHRGFLHNQAKNLLCGFYGRHAELRFLDLVPSLQLDPAQIYRVTWFISWSPCFSWGCAGEVRAFLQENTHVRLRIFAARIADPWPLYKEALQMLRDAGAQVSIMTYDEFKHCWDTFVDHQGCPFQPWDGLDEHSQALSGRLRAILQNQGNLEHHHHHH

SEQ ID NO: 312 - protein, 207 aa, synthetic construct
MEASPASGPRHLMDPHIFTSNFNNGIGRHKTYLCYEVERLDNGTSVKMDQHRGFLHNQAKNLLCGFYGRHAELRFLDLVPSLQLDPAQIYRVTWFISWSPCFSWGCAGEVRAFLQENTHVRLRIFAARIYDPWPLYKEALQMLRDAGAQVSIMTYDEFKHCWDTFVDHQGCPFQPWDGLDEHSQALSGRLRAILQNQGNLEHHHHHH

SEQ ID NO: 313 - protein, 207 aa, synthetic construct
MEASPASGPRHLMDPHIFTSNFNNGIGRHKTYLCYEVERLDNGTSVKMDQHRGFLHNQAKNLLCGFYGRHAELRFLDLVPSLQLDPAQIYRVTWFISWSPCFSWGCAGEVRAFLQENTHVRLRIFAARILDHWPLYKEALQMLRDAGAQVSIMTYDEFKHCWDTFVDHQGCPFQPWDGLDEHSQALSGRLRAILQNQGNLEHHHHHH

SEQ ID NO: 314 - protein, 207 aa, synthetic construct
MEASPASGPRHLMDPHIFTSNFNNGIGRHKTYLCYEVERLDNGTSVKMDQHRGFLHNQAKNLLCGFYGRHAELLFLDLVPSLQLDPAQIYRVTWFISWSPCFSWGCAGEVRAFLQENTHVRLRIFAARILDHATLYKEALQMLRDAGAQVSIMTYDEFKHCWDTFVDHQGCPFQPWDGLDEHSQALSGRLRAILQNQGNLEHHHHHH

SEQ ID NO: 315 - protein, 207 aa, synthetic construct
MEASPASGPRHLMDPHIFTSNFNNGIGRHKTYLCYEVERLDNGTSVKMDQHRGFLHNQAKNLLCGFYGRHAELLFLDLVPSLQLDPAQIYRVTWFISWSPCFSWGCAGEVRAFLQENTHVRLRIFAARILDHCTLYKEALQMLRDAGAQVSIMTYDEFKHCWDTFVDHQGCPFQPWDGLDEHSQALSGRLRAILQNQGNLEHHHHHH

SEQ ID NO: 316 - protein, 207 aa, synthetic construct
MEASPASGPRHLMDPHIFTSNFNNGIGRHKTYLCYEVERLDNGTSVKMDQHRGFLHNQAKNLLCGFYGRHAELLFLDLVPSLQLDPAQIYRVTWFISWSPCFSWGCAGEVRAFLQENTHVRLRIFAARILDHDTLYKEALQMLRDAGAQVSIMTYDEFKHCWDTFVDHQGCPFQPWDGLDEHSQALSGRLRAILQNQGNLEHHHHHH

SEQ ID NO: 317 - protein, 207 aa, synthetic construct
MEASPASGPRHLMDPHIFTSNFNNGIGRHKTYLCYEVERLDNGTSVKMDQHRGFLHNQAKNLLCGFYGRHAELLFLDLVPSLQLDPAQIYRVTWFISWSPCFSWGCAGEVRAFLQENTHVRLRIFAARILDHETLYKEALQMLRDAGAQVSIMTYDEFKHCWDTFVDHQGCPFQPWDGLDEHSQALSGRLRAILQNQGNLEHHHHHH

SEQ ID NO: 318 - protein, 207 aa, synthetic construct
MEASPASGPRHLMDPHIFTSNFNNGIGRHKTYLCYEVERLDNGTSVKMDQHRGFLHNQAKNLLCGFYGRHAELLFLDLVPSLQLDPAQIYRVTWFISWSPCFSWGCAGEVRAFLQENTHVRLRIFAARILDHFTLYKEALQMLRDAGAQVSIMTYDEFKHCWDTFVDHQGCPFQPWDGLDEHSQALSGRLRAILQNQGNLEHHHHHH

SEQ ID NO: 319 - protein, 207 aa, synthetic construct
MEASPASGPRHLMDPHIFTSNFNNGIGRHKTYLCYEVERLDNGTSVKMDQHRGFLHNQAKNLLCGFYGRHAELLFLDLVPSLQLDPAQIYRVTWFISWSPCFSWGCAGEVRAFLQENTHVRLRIFAARILDHGTLYKEALQMLRDAGAQVSIMTYDEFKHCWDTFVDHQGCPFQPWDGLDEHSQALSGRLRAILQNQGNLEHHHHHH

SEQ ID NO: 320 - protein, 207 aa, synthetic construct
MEASPASGPRHLMDPHIFTSNFNNGIGRHKTYLCYEVERLDNGTSVKMDQHRGFLHNQAKNLLCGFYGRHAELLFLDLVPSLQLDPAQIYRVTWFISWSPCFSWGCAGEVRAFLQENTHVRLRIFAARILDHHTLYKEALQMLRDAGAQVSIMTYDEFKHCWDTFVDHQGCPFQPWDGLDEHSQALSGRLRAILQNQGNLEHHHHHH

SEQ ID NO: 321 - protein, 207 aa, synthetic construct
MEASPASGPRHLMDPHIFTSNFNNGIGRHKTYLCYEVERLDNGTSVKMDQHRGFLHNQAKNLLCGFYGRHAELLFLDLVPSLQLDPAQIYRVTWFISWSPCFSWGCAGEVRAFLQENTHVRLRIFAARILDHITLYKEALQMLRDAGAQVSIMTYDEFKHCWDTFVDHQGCPFQPWDGLDEHSQALSGRLRAILQNQGNLEHHHHHH

SEQ ID NO: 322 - protein, 207 aa, synthetic construct
MEASPASGPRHLMDPHIFTSNFNNGIGRHKTYLCYEVERLDNGTSVKMDQHRGFLHNQAKNLLCGFYGRHAELLFLDLVPSLQLDPAQIYRVTWFISWSPCFSWGCAGEVRAFLQENTHVRLRIFAARILDHKTLYKEALQMLRDAGAQVSIMTYDEFKHCWDTFVDHQGCPFQPWDGLDEHSQALSGRLRAILQNQGNLEHHHHHH

SEQ ID NO: 323 - protein, 207 aa, synthetic construct
MEASPASGPRHLMDPHIFTSNFNNGIGRHKTYLCYEVERLDNGTSVKMDQHRGFLHNQAKNLLCGFYGRHAELLFLDLVPSLQLDPAQIYRVTWFISWSPCFSWGCAGEVRAFLQENTHVRLRIFAARILDHLTLYKEALQMLRDAGAQVSIMTYDEFKHCWDTFVDHQGCPFQPWDGLDEHSQALSGRLRAILQNQGNLEHHHHHH

SEQ ID NO: 324 - protein, 207 aa, synthetic construct
MEASPASGPRHLMDPHIFTSNFNNGIGRHKTYLCYEVERLDNGTSVKMDQHRGFLHNQAKNLLCGFYGRHAELLFLDLVPSLQLDPAQIYRVTWFISWSPCFSWGCAGEVRAFLQENTHVRLRIFAARILDHMTLYKEALQMLRDAGAQVSIMTYDEFKHCWDTFVDHQGCPFQPWDGLDEHSQALSGRLRAILQNQGNLEHHHHHH

SEQ ID NO: 325 - protein, 207 aa, synthetic construct
MEASPASGPRHLMDPHIFTSNFNNGIGRHKTYLCYEVERLDNGTSVKMDQHRGFLHNQAKNLLCGFYGRHAELLFLDLVPSLQLDPAQIYRVTWFISWSPCFSWGCAGEVRAFLQENTHVRLRIFAARILDHNTLYKEALQMLRDAGAQVSIMTYDEFKHCWDTFVDHQGCPFQPWDGLDEHSQALSGRLRAILQNQGNLEHHHHHH

SEQ ID NO: 326 - protein, 207 aa, synthetic construct
MEASPASGPRHLMDPHIFTSNFNNGIGRHKTYLCYEVERLDNGTSVKMDQHRGFLHNQAKNLLCGFYGRHAELLFLDLVPSLQLDPAQIYRVTWFISWSPCFSWGCAGEVRAFLQENTHVRLRIFAARILDHPTLYKEALQMLRDAGAQVSIMTYDEFKHCWDTFVDHQGCPFQPWDGLDEHSQALSGRLRAILQNQGNLEHHHHHH

SEQ ID NO: 327 - protein, 207 aa, synthetic construct
MEASPASGPRHLMDPHIFTSNFNNGIGRHKTYLCYEVERLDNGTSVKMDQHRGFLHNQAKNLLCGFYGRHAELLFLDLVPSLQLDPAQIYRVTWFISWSPCFSWGCAGEVRAFLQENTHVRLRIFAARILDHQTLYKEALQMLRDAGAQVSIMTYDEFKHCWDTFVDHQGCPFQPWDGLDEHSQALSGRLRAILQNQGNLEHHHHHH

SEQ ID NO: 328 - protein, 207 aa, synthetic construct
MEASPASGPRHLMDPHIFTSNFNNGIGRHKTYLCYEVERLDNGTSVKMDQHRGFLHNQAKNLLCGFYGRHAELLFLDLVPSLQLDPAQIYRVTWFISWSPCFSWGCAGEVRAFLQENTHVRLRIFAARILDHRTLYKEALQMLRDAGAQVSIMTYDEFKHCWDTFVDHQGCPFQPWDGLDEHSQALSGRLRAILQNQGNLEHHHHHH

SEQ ID NO: 329 - protein, 207 aa, synthetic construct
MEASPASGPRHLMDPHIFTSNFNNGIGRHKTYLCYEVERLDNGTSVKMDQHRGFLHNQAKNLLCGFYGRHAELLFLDLVPSLQLDPAQIYRVTWFISWSPCFSWGCAGEVRAFLQENTHVRLRIFAARILDHSTLYKEALQMLRDAGAQVSIMTYDEFKHCWDTFVDHQGCPFQPWDGLDEHSQALSGRLRAILQNQGNLEHHHHHH

SEQ ID NO: 330 - protein, 207 aa, synthetic construct
MEASPASGPRHLMDPHIFTSNFNNGIGRHKTYLCYEVERLDNGTSVKMDQHRGFLHNQAKNLLCGFYGRHAELLFLDLVPSLQLDPAQIYRVTWFISWSPCFSWGCAGEVRAFLQENTHVRLRIFAARILDHTTLYKEALQMLRDAGAQVSIMTYDEFKHCWDTFVDHQGCPFQPWDGLDEHSQALSGRLRAILQNQGNLEHHHHHH

SEQ ID NO: 331 - protein, 207 aa, synthetic construct
MEASPASGPRHLMDPHIFTSNFNNGIGRHKTYLCYEVERLDNGTSVKMDQHRGFLHNQAKNLLCGFYGRHAELLFLDLVPSLQLDPAQIYRVTWFISWSPCFSWGCAGEVRAFLQENTHVRLRIFAARILDHVTLYKEALQMLRDAGAQVSIMTYDEFKHCWDTFVDHQGCPFQPWDGLDEHSQALSGRLRAILQNQGNLEHHHHHH

SEQ ID NO: 332 - protein, 207 aa, synthetic construct
MEASPASGPRHLMDPHIFTSNFNNGIGRHKTYLCYEVERLDNGTSVKMDQHRGFLHNQAKNLLCGFYGRHAELLFLDLVPSLQLDPAQIYRVTWFISWSPCFSWGCAGEVRAFLQENTHVRLRIFAARILDHWTLYKEALQMLRDAGAQVSIMTYDEFKHCWDTFVDHQGCPFQPWDGLDEHSQALSGRLRAILQNQGNLEHHHHHH

SEQ ID NO: 333 - protein, 207 aa, synthetic construct
MEASPASGPRHLMDPHIFTSNFNNGIGRHKTYLCYEVERLDNGTSVKMDQHRGFLHNQAKNLLCGFYGRHAELLFLDLVPSLQLDPAQIYRVTWFISWSPCFSWGCAGEVRAFLQENTHVRLRIFAARILDHYTLYKEALQMLRDAGAQVSIMTYDEFKHCWDTFVDHQGCPFQPWDGLDEHSQALSGRLRAILQNQGNLEHHHHHH

SEQ ID NO: 334 - protein, 207 aa, synthetic construct
MEASPASGPRHLMDPHIFTSNFNNGIGRHKTYLCYEVERLDNGTSVKMDQHRGFLHNQAKNLLCGFYGRHAELRFLDLVPSLQLDPAQIYRVTWFISWSPCFSWGCAGEVRAFLQENTHVRLRIFAARIYDYDPLYKEALQMLRDAGAQVSIMTYDEFKHCWDTFVDHQGAPFQPWDGLDEHSQALSGRLRAILQNQGNLEHHHHHH

SEQ ID NO: 335 - protein, 207 aa, synthetic construct
MEASPASGPRHLMDPHIFTSNFNNGIGRHKTYLCYEVERLDNGTSVKMDQHRGFLHNQAKNLLCGFYGRHAELRFLDLVPSLQLDPAQIYRVTWFISWSPCFSWGCAGEVRAFLQENTHVRLRIFAARIADYDPLYKEALQMLRDAGAQVSIMTYDEFKHCWDTFVDHQGAPFQPWDGLDEHSQALSGRLRAILQNQGNLEHHHHHH

SEQ ID NO: 336 - protein, 207 aa, synthetic construct
MEASPASGPRHLMDPHIFTSNFNNGIGRHKTYLCYEVERLDNGTSVKMDQHRGFLHNQAKNLLCGFYGRHAELRFLDLVPSLQLDPAQIYRVTWFISWSPCFSWGCAGEVRAFLQENTHVRLRIFAARIADHDPLYKEALQMLRDAGAQVSIMTYDEFKHCWDTFVDHQGAPFQPWDGLDEHSQALSGRLRAILQNQGNLEHHHHHH

SEQ ID NO: 337 - protein, 207 aa, synthetic construct
MEASPASGPRHLMDPHIFTSNFNNGIGRHKTYLCYEVERLDNGTSVKMDQHRGFLHNQAKNLLCGFYGRHAELRFLDLVPSLQLDPAQIYRVTWFISWSPCFSWGCACEVRAFLQENTHVRLRIFAARIADHDPLYKEALQMLRDAGAQVSIMTYDEFKHCWDTFVDHQGCPFQPWDGLDEHSQALSGRLRAILQNQGNLEHHHHHH

SEQ ID NO: 338 - protein, 207 aa, synthetic construct
MEASPASGPRHLMDPHIFTSNFNNGIGRHKTYLCYEVERLDNGTSVKMDQHRGFLHNQAKNLLCGFYGRHAELRFLDLVPSLQLDPAQIYRVTWFISWSPCFSWGCAIEVRAFLQENTHVRLRIFAARIADHDPLYKEALQMLRDAGAQVSIMTYDEFKHCWDTFVDHQGCPFQPWDGLDEHSQALSGRLRAILQNQGNLEHHHHHH

SEQ ID NO: 339 - protein, 207 aa, synthetic construct
MEASPASGPRHLMDPHIFTSNFNNGIGRHKTYLCYEVERLDNGTSVKMDQHRGFLHNQAKNLLCGFYGRHAELRFLDLVPSLQLDPAQIYRVTWFISWSPCFSWGCAPEVRAFLQENTHVRLRIFAARIADHDPLYKEALQMLRDAGAQVSIMTYDEFKHCWDTFVDHQGCPFQPWDGLDEHSQALSGRLRAILQNQGNLEHHHHHH

SEQ ID NO: 340 - protein, 207 aa, synthetic construct
MEASPASGPRHLMDPHIFTSNFNNGIGRHKTYLCYEVERLDNGTSVKMDQHRGFLHNQAKNLLCGFYGRHAELRFLDLVPSLQLDPAQIYRVTWFISWSPCFSWGCAFEVRAFLQENTHVRLRIFAARIADHDPLYKEALQMLRDAGAQVSIMTYDEFKHCWDTFVDHQGCPFQPWDGLDEHSQALSGRLRAILQNQGNLEHHHHHH

SEQ ID NO: 341 - protein, 207 aa, synthetic construct
MEASPASGPRHLMDPHIFTSNFNNGIGRHKTYLCYEVERLDNGTSVKMDQHRGFLHNQAKNLLCGFYGRHAELRFLDLVPSLQLDPAQIYRVTWFISWSPCFSWGCAAEVRAFLQENTHVRLRIFAARIADHDPLYKEALQMLRDAGAQVSIMTYDEFKHCWDTFVDHQGCPFQPWDGLDEHSQALSGRLRAILQNQGNLEHHHHHH

SEQ ID NO: 342 - protein, 207 aa, synthetic construct
MEASPASGPRHLMDPHIFTSNFNNGIGRHKTYLCYEVERLDNGTSVKMDQHRGFLHNQAKNLLCGFYGRHAELRFLDLVPSLQLDPAQIYRVTWFISWSPCFSWGCAGEVRAFLQENTHVRLRIFAARIADHDPLYKEALQMLRDAGAQVSIMTYDEFKHCWDTFVDHQGCPFQPWDGLDEHSQALSIRLRAILQNQGNLEHHHHHH

SEQ ID NO: 343 - protein, 207 aa, synthetic construct
MEASPASGPRHLMDPHIFTSNFNNGIGRHKTYLCYEVERLDNGTSVKMDQHRGFLHNQAKNLLCGFYGRHAELRFLDLVPSLQLDPAQIYRVTWFISWSPCFSWGCAGEVRAFLQENTHVRLRIFAARIADHDPLYKEALQMLRDAGAQVSIMTYDEFKHCWDTFVDHQGCPFQPWDGLDEHSQALSYRLRAILQNQGNLEHHHHHH

SEQ ID NO: 344 - protein, 207 aa, synthetic construct
MEASPASGPRHLMDPHIFTSNFNNGIGRHKTYLCYEVERLDNGTSVKMDQHRGFLHNQAKNLLCGFYGRHAELRFLDLVPSLQLDPAQIYRVTWFISWSPCFSWGCAGEVRAFLQENTHVRLRIFAARIADHDPLYKEALQMLRDAGAQVSIMTYDEFKHCWDTFVDHQGCPFQPWDGLDEHSQALSQRLRAILQNQGNLEHHHHHH

SEQ ID NO: 345 - protein, 207 aa, synthetic construct
MEASPASGPRHLMDPHIFTSNFNNGIGRHKTYLCYEVERLDNGTSVKMDQHRGFLHNQAKNLLCGFYGRHAELRFLDLVPSLQLDPAQIYRVTWFISWSPCFSWGCAGEVRAFLQENTHVRLRIFAARIADHDPLYKEALQMLRDAGAQVSIMTYDEFKHCWDTFVDHQGCPFQPWDGLDEHSQALSRRLRAILQNQGNLEHHHHHH

SEQ ID NO: 346 - protein, 207 aa, synthetic construct
MEASPASGPRHLMDPHIFTSNFNNRIGRHKTYLCYEVERLDNGTSVKMDQHRGFLHNQAKNLLCGFYGRHAELRFLDLVPSLQLDPAQIYRVTWFISWSPCFSWGCAGEVRAFLQENTHVRLRIFAARIADHDPLYKEALQMLRDAGAQVSIMTYDEFKHCWDTFVDHQGCPFQPWDGLDEHSQALSGRLRAILQNQGNLEHHHHHH

SEQ ID NO: 347 - protein, 207 aa, synthetic construct
MEASPASGPRHLMDPHIFTSNFNNLIGRHKTYLCYEVERLDNGTSVKMDQHRGFLHNQAKNLLCGFYGRHAELRFLDLVPSLQLDPAQIYRVTWFISWSPCFSWGCAGEVRAFLQENTHVRLRIFAARIADHDPLYKEALQMLRDAGAQVSIMTYDEFKHCWDTFVDHQGCPFQPWDGLDEHSQALSGRLRAILQNQGNLEHHHHHH

SEQ ID NO: 348 - protein, 207 aa, synthetic construct
MEASPASGPRHLMDPLIFTSNFNNGIGRHKTYLCYEVERLDNGTSVKMDQHRGFLHNQAKNLLCGFYGRHAELRFLDLVPSLQLDPAQIYRVTWFISWSPCFSWGCAGEVRAFLQENTHVRLRIFAARIADHDPLYKEALQMLRDAGAQVSIMTYDEFKHCWDTFVDHQGCPFQPWDGLDEHSQALSGRLRAILQNQGNLEHHHHHH

SEQ ID NO: 349 - protein, 207 aa, synthetic construct
MEASPASGPRHLMDPWIFTSNFNNGIGRHKTYLCYEVERLDNGTSVKMDQHRGFLHNQAKNLLCGFYGRHAELRFLDLVPSLQLDPAQIYRVTWFISWSPCFSWGCAGEVRAFLQENTHVRLRIFAARIADHDPLYKEALQMLRDAGAQVSIMTYDEFKHCWDTFVDHQGCPFQPWDGLDEHSQALSGRLRAILQNQGNLEHHHHHH

SEQ ID NO: 350 - protein, 207 aa, synthetic construct
MEASPASGPRHLMDPHIFTSNFNNGIGRHKTYLCYEVERLDNGTSVKMDQHRGFLHNQAKNLLCGFYGRHAELRFLDLVPSLQLDPAQIYRVTWFISWSPCFSWGCAGEVRAFLQENTHVRLRIFAARIADHDPLYKEALQMLRDAGAQVSIMTYDEFKHCWDTFVDHQGCPFQPWDGLDEHSQALLGRLRAILQNQGNLEHHHHHH

SEQ ID NO: 351 - protein, 207 aa, synthetic construct
MEASPASGPRHLMDPHIFTSNFNNGIGRHKTYLCYEVERLDNGTSVKMDQHRGFLHNQAKNLLCGFYGRHAELRFLDLVPSLQLDPAQIYRVTWFISWSPCFSWGCAGEVRAFLQENTHVRLRIFAARIADHDPLYKEALQMLRDAGAQVSIMTYDEFKHCWDTFVDHQGCPFQPWDGLDEHSQAWSGRLRAILQNQGNLEHHHHHH

SEQ ID NO: 352 - protein, 207 aa, synthetic construct
MEASPASGPRHLMDPHIFTSNFNNGIGRHKTYLCYEVERLDNGTSVKMDQHRGFLHNQAKNLLCGFYGRHAELRFLDLVPSLQLDPAQIYRVTWFISWSPCFSWGCAGEVRAFLQENTHVRLRIFAARIADHDPLYKEALQMLRDAGAQVSIMTYDEFKHCWDTFVDHQGCPFQPWDGLWEHSQALSGRLRAILQNQGNLEHHHHHH

SEQ ID NO: 353 - protein, 207 aa, synthetic construct
MEASPASGPRHLMDPHIFTSNFNNGIGRHKTYLCYEVERLDNGTSVKMDQHRGFLHNQAKNLLCGFYGRHAELRFLDLVPSLQLDPAQIYRVTWFISWSPCFSWGCAGEVRAFLQENWHVRLRIFAARIADHDPLYKEALQMLRDAGAQVSIMTYDEFKHCWDTFVDHQGCPFQPWDGLDEHSQALSGRLRAILQNQGNLEHHHHHH

SEQ ID NO: 354 - protein, 207 aa, synthetic construct
MEASPASGPRHLMDPHIFTSNFNNGIGRHKTYLCYEVERLDNGTSVKMDQHRGFLHNQAKNLLCGFYGRHAELRFLDLVPSLQLDPAQIYLVTWFISWSPCFSWGCAGEVRAFLQENTHVRLRIFAARIADHDPLYKEALQMLRDAGAQVSIMTYDEFKHCWDTFVDHQGCPFQPWDGLDEHSQALSGRLRAILQNQGNLEHHHHHH

SEQ ID NO: 355 - protein, 207 aa, synthetic construct
MEASPASGPRHLMDPHIFTSNFNNGIGRHKTYLCYEVERLDNGTSVKMDQLRGFLHNQAKNLLCGFYGRHAELRFLDLVPSLQLDPAQIYRVTWFISWSPCFSWGCAGEVRAFLQENTHVRLRIFAARIADHDPLYKEALQMLRDAGAQVSIMTYDEFKHCWDTFVDHQGCPFQPWDGLDEHSQALSGRLRAILQNQGNLEHHHHHH

SEQ ID NO: 356 - protein, 207 aa, synthetic construct
MEASPASGPRHLMDPHIFTSNFNNGIGRHKTYLCYEVERLDNGTTVKMDQHRGFLHNQAKNLLCGFYGRHAELRFLDLVPSLQLDPAQIYRVTWFISWSPCFSWGCAGEVRAFLQENTHVRLRIFAARIADHDPLYKEALQMLRDAGAQVSIMTYDEFKHCWDTFVDHQGCPFQPWDGLDEHSQALSGRLRAILQNQGNLEHHHHHH

SEQ ID NO: 357 - protein, 207 aa, synthetic construct
MEASPASGPRHLMDPHIFYSNFNNGIGRHKTYLCYEVERLDNGTSVKMDQHRGFLHNQAKNLLCGFYGRHAELRFLDLVPSLQLDPAQIYRVTWFISWSPCFSWGCAGEVRAFLQENTHVRLRIFAARIADHDPLYKEALQMLRDAGAQVSIMTYDEFKHCWDTFVDHQGCPFQPWDGLDEHSQALSGRLRAILQNQGNLEHHHHHH

SEQ ID NO: 358 - protein, 207 aa, synthetic construct
MEASPASGPRHLMDPHIFTSNFNNGIGRHKTYLCYEVERLDNGTSVKMDQHRGFLHNQAKNLLCGFRGRHAELRFLDLVPSLQLDPAQIYRVTWFISWSPCFSWGCAGEVRAFLQENTHVRLRIFAARIADHDPLYKEALQMLRDAGAQVSIMTYDEFKHCWDTFVDHQGCPFQPWDGLDEHSQALSGRLRAILQNQGNLEHHHHHH

SEQ ID NO: 359 - protein, 207 aa, synthetic construct
MEASPASGPRHLMDPHIFTSNFNNGIGRHKTYLCYEVERLDNGTSVKMDQHRGFLHNQAKNLLCGFYGRHAEARFLDLVPSLQLDPAQIYRVTWFISWSPCFSWGCAGEVRAFLQENTHVRLRIFAARIADHDPLYKEALQMLRDAGAQVSIMTYDEFKHCWDTFVDHQGCPFQPWDGLDEHSQALSGRLRAILQNQGNLEHHHHHH

SEQ ID NO: 360 - protein, 207 aa, synthetic construct
MEASPASGPRHLMDPHIFTSNFNNGIGRHKTYLCYEVERLDNGTSVKMDQHRGFLHNQAKNLLCGFYGRHAELNFLDLVPSLQLDPAQIYRVTWFISWSPCFSWGCAGEVRAFLQENTHVRLRIFAARIADHDPLYKEALQMLRDAGAQVSIMTYDEFKHCWDTFVDHQGCPFQPWDGLDEHSQALSGRLRAILQNQGNLEHHHHHH

SEQ ID NO: 361 - protein, 207 aa, synthetic construct
MEASPASGPRHLMDPHIFTSNFNNGIGRHKTYLCYEVERLDNGTSVKMDQHRGFLHNQAKNLLCGFYGRHAELRFLDLVPSLQLDPAQIGRVTWFISWSPCFSWGCAGEVRAFLQENTHVRLRIFAARIADHDPLYKEALQMLRDAGAQVSIMTYDEFKHCWDTFVDHQGCPFQPWDGLDEHSQALSGRLRAILQNQGNLEHHHHHH

SEQ ID NO: 362 - protein, 207 aa, synthetic construct
MEASPASGPRHLMDPHIFTSNFNNGIGRHKTYLCYEVERLDNGTSVKMDQHRGFLHNQAKNLLCGFYGRHAELRFLDLVPSLQLDPAQIYRVTLFISWSPCFSWGCAGEVRAFLQENTHVRLRIFAARIADHDPLYKEALQMLRDAGAQVSIMTYDEFKHCWDTFVDHQGCPFQPWDGLDEHSQALSGRLRAILQNQGNLEHHHHHH

SEQ ID NO: 363 - protein, 207 aa, synthetic construct
MEASPASGPRHLMDPHIFTSNFNNGIGRHKTYLCYEVERLDNGTSVKMDQHRGFLHNQAKNLLCGFYGRHAELRFLDLVPSLQLDPAQIYRVTWFTSWSPCFSWGCAGEVRAFLQENTHVRLRIFAARIADHDPLYKEALQMLRDAGAQVSIMTYDEFKHCWDTFVDHQGCPFQPWDGLDEHSQALSGRLRAILQNQGNLEHHHHHH

SEQ ID NO: 364 - protein, 207 aa, synthetic construct
MEASPASGPRHLMDPHIFTSNFNNGIGRHKTYLCYEVERLDNGTSVKMDQHRGFLHNQAKNLLCGFYGRHAELRFLDLVPSLQLDPAQIYRVTWFISWSPCFSWSCAGEVRAFLQENTHVRLRIFAARIADHDPLYKEALQMLRDAGAQVSIMTYDEFKHCWDTFVDHQGCPFQPWDGLDEHSQALSGRLRAILQNQGNLEHHHHHH

SEQ ID NO: 365 - protein, 199 aa, synthetic construct
MEASPASGPRHLMDPHIFTSNFNNVIGRHKTYLCYEVERLDNGTSVKMDQHRGFLHNQAKNLLCGFYGRHAELRFLDLVPSLQLDPAQIYRVTWFISWSPCFSWGCAGEVRAFLQENTHVRLRIFAARIADHDPLYKEALQMLRDAGAQVSIMTYDEFKHCWDTFVDHQGCPFQPWDGLDEHSQALSGRLRAILQNQGN

SEQ ID NO: 366 - protein, 199 aa, synthetic construct
MEASPASGPRHLMDPHIFTSNFNNGIGRHKTYLCYEVERLDNGTWVKMDQHRGFLHNQAKNLLCGFYGRHAELRFLDLVPSLQLDPAQIYRVTWFISWSPCFSWGCAGEVRAFLQENTHVRLRIFAARIADHDPLYKEALQMLRDAGAQVSIMTYDEFKHCWDTFVDHQGCPFQPWDGLDEHSQALSGRLRAILQNQGN

SEQ ID NO: 367 - protein, 199 aa, synthetic construct
MEASPASGPRHLMDPHIFTSNFNNGIGRHKTYLCYEVERLDNGTSVKMDQHRGFLHNQAKNLLCGFYGRHAELRFLDLVPSLQLDPAQIYRVTWFISWSPCFSWGCAGQVRAFLQENTHVRLRIFAARIADHDPLYKEALQMLRDAGAQVSIMTYDEFKHCWDTFVDHQGCPFQPWDGLDEHSQALSGRLRAILQNQGN

SEQ ID NO: 368 - protein, 199 aa, synthetic construct
MEASPASGPRHLMDPHIFTSNFNNGIGRHKTYLCYEVERLDNGTSVKMDQHRGFLHNQAKNLLCGFYGRHAELRFLDLVPSLQLDPAQIYRVTWFISWSPCFSWGCAGEVRAFLQENTHVRLHIFAARIADHDPLYKEALQMLRDAGAQVSIMTYDEFKHCWDTFVDHQGCPFQPWDGLDEHSQALSGRLRAILQNQGN

SEQ ID NO: 369 - protein, 199 aa, synthetic construct
MEASPASGPRHLMDPHIFTSNFNNGIGRHKTYLCYEVERLDNGTSVKMDQHRGFLHNQAKNLLCGFYGRHAELRFLDLVPSLQLDPAQIYRVTWFISWSPCFSWGCAGEVRAFLQENTHVRLRIFAARIADHDPLYKEALQMLRDAGAQVSIMTYDEFKHCWDTFVDHQGCPFQPWDGLEEHSQALSGRLRAILQNQGN

SEQ ID NO: 370-372 - skipped (3 entries)

SEQ ID NO: 373 - protein, 199 aa, synthetic construct
MEASPASGPRHLMDPHIFTSNFNNGIGRHKTYLCYEVERLDNGTSVKMDQHRGFLHNQAKNLLCGFYGRHAELLFLDLVPSLQLDPAQIYRVTWFISWSPCFSWGCAGEVRAFLQENTHVRLRIFAARIADHDPLYKEALQMLRDAGAQVSIMTYDEFKHCWDTFVDHQGCPFQPWDGLDEHSQALSGRLRAILQNQGN

SEQ ID NO: 374-375 - skipped (2 entries)

SEQ ID NO: 376 - protein, 199 aa, synthetic construct
MEASPASGPRHLMDPHIFTSNFNNGIGRHKTYLCYEVERLDNGTSVKMDQHRGFLHNQAKNLLCGFYGRHAELLFLDLVPSLQLDPAQIYRVTWFISWSPCFSWGCAGEVRAFLQENTHVRLRIFAARIADHWPLYKEALQMLRDAGAQVSIMTYDEFKHCWDTFVDHQGAPFQPWDGLDEHSQALSGRLRAILQNQGN

SEQ ID NO: 377 - protein, 199 aa, synthetic construct
MEASPASGPRHLMDPHIFYSNFNNGIGRHKTYLCYEVERLDNGTSVKMDQHRGFLHNQAKNLLCGFYGRHAELRFLDLVPSLQLDPAQIYRVTWFISWSPCFSWGCAGEVRAFLQENTHVRLRIFAARIADHWPLYKEALQMLRDAGAQVSIMTYDEFKHCWDTFVDHQGCPFQPWDGLDEHSQALSGRLRAILQNQGN

SEQ ID NO: 378 - protein, 199 aa, synthetic construct
MEASPASGPRHLMDPHIFTSNFNNRIGRHKTYLCYEVERLDNGTSVKMDQHRGFLHNQAKNLLCGFYGRHAELRFLDLVPSLQLDPAQIYRVTWFISWSPCFSWGCAGEVRAFLQENTHVRLRIFAARIADHWPLYKEALQMLRDAGAQVSIMTYDEFKHCWDTFVDHQGCPFQPWDGLDEHSQALSGRLRAILQNQGN

SEQ ID NO: 379 - skipped

SEQ ID NO: 380 - protein, 199 aa, synthetic construct
MEASPASGPRHLMDPHIFTSNFNNRIGRHKTYLCYEVERLDNGTSVKMDQHRGFLHNQAKNLLCGFYGRHAELLFLDLVPSLQLDPAQIYRVTWFISWSPCFSWGCAGEVRAFLQENTHVRLRIFAARIADHWPLYKEALQMLRDAGAQVSIMTYDEFKHCWDTFVDHQGCPFQPWDGLDEHSQALSGRLRAILQNQGN

SEQ ID NO: 381 - protein, 212 aa, synthetic construct
MHHHHHHGGSGGGSEASPASGPRHLMDPHIFTSNFNNGIGRHKTYLCYEVERLDNGTSVKMDQHRGFLHNQAKNLLCGFYGRHAELRFLDLVPSLQLDPAQIYRVTWFISWSPCFSWGCAGEVRAFLQENTHVRLRIFAARIADHDPLYKEALQMLRDAGAQVSIMTYDEFKHCWDTFVDHQGAPFQPWDGLDEHSQALSGRLRAILQNQGN

SEQ ID NO: 382 - protein, 199 aa, synthetic construct
MEASPASGPRHLMDPHIFISNFNNGIGRHKTYLCYEVERLDNGTSVKMDQHRGFLHNQAKNLLCGFYGRHAELLFLDLVPSLQLDPAQIYRVTWFISWSPCFSWGCAGEVRAFLQENTHVRLRIFAARIADHWPLYKEALQMLRDAGAQVSIMTYDEFKHCWDTFVDHQGAPFQPWDGLDEHSQALSGRLRAILQNQGN

SEQ ID NO: 383 - protein, 199 aa, synthetic construct
MEASPASGPRHLMDPHIFLSNFNNGIGRHKTYLCYEVERLDNGTSVKMDQHRGFLHNQAKNLLCGFYGRHAELLFLDLVPSLQLDPAQIYRVTWFISWSPCFSWGCAGEVRAFLQENTHVRLRIFAARIADHWPLYKEALQMLRDAGAQVSIMTYDEFKHCWDTFVDHQGAPFQPWDGLDEHSQALSGRLRAILQNQGN

SEQ ID NO: 384 - protein, 199 aa, synthetic construct
MEASPASGPRHLMDPHIFYSNFNNGRGRHKTYLCYEVERLDNGTSVKMDQHRGFLHNQAKNLLCGFYGRHAELLFLDLVPSLQLDPAQIYRVTWFISWSPCFSWGCAGEVRAFLQENTHVRLRIFAARIADHWPLYKEALQMLRDAGAQVSIMTYDEFKHCWDTFVDHQGAPFQPWDGLDEHSQALSGRLRAILQNQGN

SEQ ID NO: 385 - protein, 199 aa, synthetic construct
MEASPASGPRHLMDPHIFYSNFNNGIGRHKTYLCYEVERLDNGTSVKMDQHRGFLHNQAKNLLCGFYGRHAELLFLRLVPSLQLDPAQIYRVTWFISWSPCFSWGCAGEVRAFLQENTHVRLRIFAARIADHWPLYKEALQMLRDAGAQVSIMTYDEFKHCWDTFVDHQGAPFQPWDGLDEHSQALSGRLRAILQNQGN

SEQ ID NO: 386 - protein, 199 aa, synthetic construct
MEASPASGPRHLMDPHIFYSNFNNGIGRHKTYLCYEVERLDNGTSVKMDQHRGFLHNQAKNLLCGFYGRHAELLFLDHVPSLQLDPAQIYRVTWFISWSPCFSWGCAGEVRAFLQENTHVRLRIFAARIADHWPLYKEALQMLRDAGAQVSIMTYDEFKHCWDTFVDHQGAPFQPWDGLDEHSQALSGRLRAILQNQGN

SEQ ID NO: 387 - protein, 199 aa, synthetic construct
MEASPASGPRHLMDPHIFYSNFNNGIGRHKTYLCYEVERLDNGTSVKMDQHRGFLHNQAKNLLCGFYGRHAELLFLDLVGSLQLDPAQIYRVTWFISWSPCFSWGCAGEVRAFLQENTHVRLRIFAARIADHWPLYKEALQMLRDAGAQVSIMTYDEFKHCWDTFVDHQGAPFQPWDGLDEHSQALSGRLRAILQNQGN

SEQ ID NO: 388 - protein, 199 aa, synthetic construct
MEASPASGPRHLMDPHIFYSNFNNGIGRHKTYLCYEVERLDNGTSVKMDQHRGFLHNQAKNLLCGFYGRHAELLFLDLVSSLQLDPAQIYRVTWFISWSPCFSWGCAGEVRAFLQENTHVRLRIFAARIADHWPLYKEALQMLRDAGAQVSIMTYDEFKHCWDTFVDHQGAPFQPWDGLDEHSQALSGRLRAILQNQGN

SEQ ID NO: 389 - protein, 199 aa, synthetic construct
MEASPASGPRHLMDPHIFYSNFNNGIGRHKTYLCYEVERLDNGTSVKMDQHRGFLHNQAKNLLCGFYGRHAELLFLDLVPSLQLDPAQIYRVTWFISWSPCFSWGCAGEVRAFLQENTHVRLRIFAARIADHWPLYKEALQMLRDAGVQVSIMTYDEFKHCWDTFVDHQGAPFQPWDGLDEHSQALSGRLRAILQNQGN

SEQ ID NO: 390 - protein, 199 aa, synthetic construct
MEASPASGPRHLMYPHIFYSNFNNGIGRHKTYLCYEVERLDNGTSVKMDQHRGFLHNQAKNLLCGFYGRHAELLFLDLVPSLQLDPAQIYRVTWFISWSPCFSWGCAGEVRAFLQENTHVRLRIFAARIADHWPLYKEALQMLRDAGAQVSIMTYDEFKHCWDTFVDHQGAPFQPWDGLDEHSQALSGRLRAILQNQGN

SEQ ID NO: 391 - protein, 199 aa, synthetic construct
MEASPASGPRHLMDPHTFYSNFNNGIGRHKTYLCYEVERLDNGTSVKMDQHRGFLHNQAKNLLCGFYGRHAELLFLDLVPSLQLDPAQIYRVTWFISWSPCFSWGCAGEVRAFLQENTHVRLRIFAARIADHWPLYKEALQMLRDAGAQVSIMTYDEFKHCWDTFVDHQGAPFQPWDGLDEHSQALSGRLRAILQNQGN

SEQ ID NO: 392 - protein, 199 aa, synthetic construct
MEASPASGPRHLMDPHIFYFNFNNGIGRHKTYLCYEVERLDNGTSVKMDQHRGFLHNQAKNLLCGFYGRHAELLFLDLVPSLQLDPAQIYRVTWFISWSPCFSWGCAGEVRAFLQENTHVRLRIFAARIADHWPLYKEALQMLRDAGAQVSIMTYDEFKHCWDTFVDHQGAPFQPWDGLDEHSQALSGRLRAILQNQGN

SEQ ID NO: 393 - protein, 199 aa, synthetic construct
MEASPASGPRHLMDPHIFYSHFNNGIGRHKTYLCYEVERLDNGTSVKMDQHRGFLHNQAKNLLCGFYGRHAELLFLDLVPSLQLDPAQIYRVTWFISWSPCFSWGCAGEVRAFLQENTHVRLRIFAARIADHWPLYKEALQMLRDAGAQVSIMTYDEFKHCWDTFVDHQGAPFQPWDGLDEHSQALSGRLRAILQNQGN

SEQ ID NO: 394 - protein, 199 aa, synthetic construct
MEASPASGPRHLMDPHIFYSNFNNAIGRHKTYLCYEVERLDNGTSVKMDQHRGFLHNQAKNLLCGFYGRHAELLFLDLVPSLQLDPAQIYRVTWFISWSPCFSWGCAGEVRAFLQENTHVRLRIFAARIADHWPLYKEALQMLRDAGAQVSIMTYDEFKHCWDTFVDHQGAPFQPWDGLDEHSQALSGRLRAILQNQGN

SEQ ID NO: 395 - protein, 199 aa, synthetic construct
MEASPASGPRHLMDPHIFYSNFNNGIGRHKTYLCYEVERLKNGTSVKMDQHRGFLHNQAKNLLCGFYGRHAELLFLDLVPSLQLDPAQIYRVTWFISWSPCFSWGCAGEVRAFLQENTHVRLRIFAARIADHWPLYKEALQMLRDAGAQVSIMTYDEFKHCWDTFVDHQGAPFQPWDGLDEHSQALSGRLRAILQNQGN

SEQ ID NO: 396 - skipped

SEQ ID NO: 397 - protein, 199 aa, synthetic construct
MEASPASGPRHLMDPHIFFSNFNNRIGRHKTYLCYEVERLDNGTSVKMDQHRGFLHNQAKNLLCGFYGRHAELLFLDLVPSLQLDPAQIYRVTWFISWSPCFSWGCAGEVRAFLQENTHVRLRIFAARIADHWPLYKEALQMLRDAGAQVSIMTYDEFKHCWDTFVDHQGAPFQPWDGLDEHSQALSGRLRAILQNQGN

SEQ ID NO: 398 - protein, 199 aa, synthetic construct
MEASPASGPRHLMDPHIFYSNFNNRLGRHKTYLCYEVERLDNGTSVKMDQHRGFLHNQAKNLLCGFYGRHAELLFLDLVPSLQLDPAQIYRVTWFISWSPCFSWGCAGEVRAFLQENTHVRLRIFAARIADHWPLYKEALQMLRDAGAQVSIMTYDEFKHCWDTFVDHQGAPFQPWDGLDEHSQALSGRLRAILQNQGN

SEQ ID NO: 399 - protein, 199 aa, synthetic construct
MEASPASGPRHLMDPHIFYSNFNNGIGRHKTYLCYEVERLDNGTSVKMDQHRGFLHNQAKNLLCGFYGRHAELLFLDLVPSLQLDPAQTYRVTWFISWSPCFSWGCAGEVRAFLQENTHVRLRIFAARIADHWPLYKEALQMLRDAGAQVSIMTYDEFKHCWDTFVDHQGAPFQPWDGLDEHSQALSGRLRAILQNQGN

SEQ ID NO: 400 - protein, 199 aa, synthetic construct
MEASPASGPRHLMDPHIFYSNFNNGIGRHKTYLCYEVERLDNGTSVKMDQHRGFLHNQAKNLLCGFYGRHAELLFLDLVPSLQLDPAQRYRVTWFISWSPCFSWGCAGEVRAFLQENTHVRLRIFAARIADHWPLYKEALQMLRDAGAQVSIMTYDEFKHCWDTFVDHQGAPFQPWDGLDEHSQALSGRLRAILQNQGN

SEQ ID NO: 401 - protein, 199 aa, synthetic construct
MEASPASGPRHLMDPHIFYSNFNNGIGRHKTYLCYEVERLDNGTSVKMDQHRGFLHNQAKNLLCGFYGRHAELLFLDLVPSLQLDPAQHYRVTWFISWSPCFSWGCAGEVRAFLQENTHVRLRIFAARIADHWPLYKEALQMLRDAGAQVSIMTYDEFKHCWDTFVDHQGAPFQPWDGLDEHSQALSGRLRAILQNQGN

SEQ ID NO: 402 - protein, 199 aa, synthetic construct
MEASPASGPRHLMDPHIFYSNFNNDIGRHKTYLCYEVERLDNGTSVKMDQHRGFLHNQAKNLLCGFYGRHAELLFLDLVPSLQLDPAQIYRVTWFISWSPCFSWGCAGEVRAFLQENTHVRLRIFAARIADHWPLYKEALQMLRDAGAQVSIMTYDEFKHCWDTFVDHQGAPFQPWDGLDEHSQALSGRLRAILQNQGN

SEQ ID NO: 403 - protein, 199 aa, synthetic construct
MEASPASGPRHLMDPHIFYSNFNNGIGRHKTYLCYEVERLDNGTSVKMDQHRGFLHNQAKNLLCGFYGRHAELLFLDLVPSLQLDPAQIYRVTWFISWSPCFSWGCAGEVRAFLQENTHVRLRIFAARIADHWPLYKEALRMLRDAGAQVSIMTYDEFKHCWDTFVDHQGAPFQPWDGLDEHSQALSGRLRAILQNQGN

SEQ ID NO: 404 - protein, 199 aa, synthetic construct
MEASPASGPRHLMDPHIFYSNFNNGIGRHKTYLCYEVERLDNGTSVKMDQHRGFLHNQAKNLLCGFYGRHAELLFLDLVPSLQLDPAQCYRVTWFISWSPCFSWGCAGEVRAFLQENTHVRLRIFAARIADHWPLYKEALQMLRDAGAQVSIMTYDEFKHCWDTFVDHQGAPFQPWDGLDEHSQALSGRLRAILQNQGN

SEQ ID NO: 405 - protein, 199 aa, synthetic construct
MEASPASGPRHLMDPHIFYSNFNNGIGRHKTYLCYEVERLDNGTRVKMDQHRGFLHNQAKNLLCGFYGRHAELLFLDLVPSLQLDPAQIYRVTWFISWSPCFSWGCAGEVRAFLQENTHVRLRIFAARIADHWPLYKEALQMLRDAGAQVSIMTYDEFKHCWDTFVDHQGAPFQPWDGLDEHSQALSGRLRAILQNQGN

SEQ ID NO: 406 - protein, 199 aa, synthetic construct
MEASPASGPRHLMDPHIFYSNFNNGIGRHKTYLCYEVERLDNGTSVKMDQHRGFLHNQAKNLLCGFYGRHAELLFLDLVPSLQLDPAQQYRVTWFISWSPCFSWGCAGEVRAFLQENTHVRLRIFAARIADHWPLYKEALQMLRDAGAQVSIMTYDEFKHCWDTFVDHQGAPFQPWDGLDEHSQALSGRLRAILQNQGN

SEQ ID NO: 407 - protein, 199 aa, synthetic construct
MEASPASGPRHLMDPHIFYSNFNNGIGRHKTYLCYEVERLDNGTSVKMDQHRGFLHNQAKNLLCGFYGRHAELLFLDLVPSLQLDPAQSYRVTWFISWSPCFSWGCAGEVRAFLQENTHVRLRIFAARIADHWPLYKEALQMLRDAGAQVSIMTYDEFKHCWDTFVDHQGAPFQPWDGLDEHSQALSGRLRAILQNQGN

SEQ ID NO: 408 - protein, 199 aa, synthetic construct
MEASPASGPRHLMDPHIFYSNFNNGIGRHKTYLCYEVERLDNGTSVKMDQHRGFLHNQAKNLLCGFYGRHAELLFLDLVPSLQLDPAQDYRVTWFISWSPCFSWGCAGEVRAFLQENTHVRLRIFAARIADHWPLYKEALQMLRDAGAQVSIMTYDEFKHCWDTFVDHQGAPFQPWDGLDEHSQALSGRLRAILQNQGN

SEQ ID NO: 409 - protein, 199 aa, synthetic construct
MEASPASGPRHLMDPHIFYSNFNNGIGRHKTYLCYEVERLDNGTSVKMDQHRGFLHNQAKNLLCGFYGRHAELCFLDLVPSLQLDPAQIYRVTWFISWSPCFSWGCAGEVRAFLQENTHVRLRIFAARIADHWPLYKEALQMLRDAGAQVSIMTYDEFKHCWDTFVDHQGAPFQPWDGLDEHSQALSGRLRAILQNQGN

SEQ ID NO: 410 - protein, 199 aa, synthetic construct
MEASPASGPRPLMDPHIFYSNFNNGIGRHKTYLCYEVERLDNGTSVKMDQHRGFLHNQAKNLLCGFYGRHAELLFLDLVPSLQLDPAQIYRVTWFISWSPCFSWGCAGEVRAFLQENTHVRLRIFAARIADHWPLYKEALQMLRDAGAQVSIMTYDEFKHCWDTFVDHQGAPFQPWDGLDEHSQALSGRLRAILQNQGN

SEQ ID NO: 411 - protein, 199 aa, synthetic construct
MEASPASGPRRLMDPHIFYSNFNNGIGRHKTYLCYEVERLDNGTSVKMDQHRGFLHNQAKNLLCGFYGRHAELLFLDLVPSLQLDPAQIYRVTWFISWSPCFSWGCAGEVRAFLQENTHVRLRIFAARIADHWPLYKEALQMLRDAGAQVSIMTYDEFKHCWDTFVDHQGAPFQPWDGLDEHSQALSGRLRAILQNQGN

SEQ ID NO: 412 - protein, 199 aa, synthetic construct
MEASPASGPRHLMDPHIFFSNFNNGIGRHKTYLCYEVERLDNGTSVKMDQHRGFLHNQAKNLLCGFYGRHAELLFLDLVPSLQLDPAQIYRVTWFISWSPCFSWGCAGEVRAFLQENTHVRLRIFAARIADHWPLYKEALQMLRDAGAQVSIMTYDEFKHCWDTFVDHQGAPFQPWDGLDEHSQALSGRLRAILQNQGN

SEQ ID NO: 413 - protein, 199 aa, synthetic construct
MEASPASGPRHLMDPHIFWSNFNNGIGRHKTYLCYEVERLDNGTSVKMDQHRGFLHNQAKNLLCGFYGRHAELLFLDLVPSLQLDPAQIYRVTWFISWSPCFSWGCAGEVRAFLQENTHVRLRIFAARIADHWPLYKEALQMLRDAGAQVSIMTYDEFKHCWDTFVDHQGAPFQPWDGLDEHSQALSGRLRAILQNQGN

SEQ ID NO: 414 - protein, 199 aa, synthetic construct
MEASPASGPRHLMDPHIFYSNFNNGIIRHKTYLCYEVERLDNGTSVKMDQHRGFLHNQAKNLLCGFYGRHAELLFLDLVPSLQLDPAQIYRVTWFISWSPCFSWGCAGEVRAFLQENTHVRLRIFAARIADHWPLYKEALQMLRDAGAQVSIMTYDEFKHCWDTFVDHQGAPFQPWDGLDEHSQALSGRLRAILQNQGN

SEQ ID NO: 415 - protein, 199 aa, synthetic construct
MEASPASGPRHLMDPHIFYSNFNNGIGRHKIYLCYEVERLDNGTSVKMDQHRGFLHNQAKNLLCGFYGRHAELLFLDLVPSLQLDPAQIYRVTWFISWSPCFSWGCAGEVRAFLQENTHVRLRIFAARIADHWPLYKEALQMLRDAGAQVSIMTYDEFKHCWDTFVDHQGAPFQPWDGLDEHSQALSGRLRAILQNQGN

SEQ ID NO: 416 - protein, 199 aa, synthetic construct
MEASPASGPRHLMDPHIFYSNFNNGIGRHKTYLLYEVERLDNGTSVKMDQHRGFLHNQAKNLLCGFYGRHAELLFLDLVPSLQLDPAQIYRVTWFISWSPCFSWGCAGEVRAFLQENTHVRLRIFAARIADHWPLYKEALQMLRDAGAQVSIMTYDEFKHCWDTFVDHQGAPFQPWDGLDEHSQALSGRLRAILQNQGN

SEQ ID NO: 417 - protein, 199 aa, synthetic construct
MEASPASGPRHLMDPHIFYSNFNNGIGRHKTYLIYEVERLDNGTSVKMDQHRGFLHNQAKNLLCGFYGRHAELLFLDLVPSLQLDPAQIYRVTWFISWSPCFSWGCAGEVRAFLQENTHVRLRIFAARIADHWPLYKEALQMLRDAGAQVSIMTYDEFKHCWDTFVDHQGAPFQPWDGLDEHSQALSGRLRAILQNQGN

SEQ ID NO: 418 - protein, 199 aa, synthetic construct
MEASPASGPRHLMDPHIFYSNFNNGIGRHKTYLCYEVERLDNGTSVKMDQHRGFLHNQPKNLLCGFYGRHAELLFLDLVPSLQLDPAQIYRVTWFISWSPCFSWGCAGEVRAFLQENTHVRLRIFAARIADHWPLYKEALQMLRDAGAQVSIMTYDEFKHCWDTFVDHQGAPFQPWDGLDEHSQALSGRLRAILQNQGN

SEQ ID NO: 419 - protein, 199 aa, synthetic construct
MEASPASGPRHLMDPHIFYSNFNNGIGRHKTYLCYEVERLDNGTSVKMDQHRGFLHNQAKNPLCGFYGRHAELLFLDLVPSLQLDPAQIYRVTWFISWSPCFSWGCAGEVRAFLQENTHVRLRIFAARIADHWPLYKEALQMLRDAGAQVSIMTYDEFKHCWDTFVDHQGAPFQPWDGLDEHSQALSGRLRAILQNQGN

SEQ ID NO: 420 - protein, 199 aa, synthetic construct
MEASPASGPRHLMDPHIFYSNFNNGIGRHKTYLCYEVERLDNGTSVKMDQHRGFLHNQAKNLLCGFYGRHAELIFLDLVPSLQLDPAQIYRVTWFISWSPCFSWGCAGEVRAFLQENTHVRLRIFAARIADHWPLYKEALQMLRDAGAQVSIMTYDEFKHCWDTFVDHQGAPFQPWDGLDEHSQALSGRLRAILQNQGN

SEQ ID NO: 421 - protein, 199 aa, synthetic construct
MEASPASGPRHLMDPHIFYSNFNNGIGRHKTYLCYEVERLDNGTSVKMDQHRGFLHNQAKNLLCGFYGRHAELLFLDLLPSLQLDPAQIYRVTWFISWSPCFSWGCAGEVRAFLQENTHVRLRIFAARIADHWPLYKEALQMLRDAGAQVSIMTYDEFKHCWDTFVDHQGAPFQPWDGLDEHSQALSGRLRAILQNQGN

SEQ ID NO: 422 - protein, 199 aa, synthetic construct
MEASPASGPRHLMDPHIFYSNFNNGIGRHKTYLCYEVERLDNGTSVKMDQHRGFLHNQAKNLLCGFYGRHAELLFLDLVKSLQLDPAQIYRVTWFISWSPCFSWGCAGEVRAFLQENTHVRLRIFAARIADHWPLYKEALQMLRDAGAQVSIMTYDEFKHCWDTFVDHQGAPFQPWDGLDEHSQALSGRLRAILQNQGN

SEQ ID NO: 423 - protein, 199 aa, synthetic construct
MEASPASGPRHLMDPHIFYSNFNNGIGRHKTYLCYEVERLDNGTSVKMDQHRGFLHNQAKNLLCGFYGRHAELLFLDLVLSLQLDPAQIYRVTWFISWSPCFSWGCAGEVRAFLQENTHVRLRIFAARIADHWPLYKEALQMLRDAGAQVSIMTYDEFKHCWDTFVDHQGAPFQPWDGLDEHSQALSGRLRAILQNQGN

SEQ ID NO: 424 - protein, 199 aa, synthetic construct
MEASPASGPRHLMDPHIFYSNFNNGIGRHKTYLCYEVERLDNGTSVKMDQHRGFLHNQAKNLLCGFYGRHAELLFLDLVWSLQLDPAQIYRVTWFISWSPCFSWGCAGEVRAFLQENTHVRLRIFAARIADHWPLYKEALQMLRDAGAQVSIMTYDEFKHCWDTFVDHQGAPFQPWDGLDEHSQALSGRLRAILQNQGN

SEQ ID NO: 425 - protein, 199 aa, synthetic construct
MEASPASGPRHLMDPHIFYSNFNNGIGRHKTYLCYEVERLDNGTSVKMDQHRGFLHNQAKNLLCGFYGRHAELLFLDLVRSLQLDPAQIYRVTWFISWSPCFSWGCAGEVRAFLQENTHVRLRIFAARIADHWPLYKEALQMLRDAGAQVSIMTYDEFKHCWDTFVDHQGAPFQPWDGLDEHSQALSGRLRAILQNQGN

SEQ ID NO: 426 - protein, 199 aa, synthetic construct
MEASPASGPRHLMDPHIFYSNFNNGIGRHKTYLCYEVERLDNGTSVKMDQHRGFLHNQAKNLLCGFYGRHAELLFLDLVFSLQLDPAQIYRVTWFISWSPCFSWGCAGEVRAFLQENTHVRLRIFAARIADHWPLYKEALQMLRDAGAQVSIMTYDEFKHCWDTFVDHQGAPFQPWDGLDEHSQALSGRLRAILQNQGN

SEQ ID NO: 427 - protein, 199 aa, synthetic construct
MEASPASGPRHLMDPHIFYSNFNNGIGRHKTYLCYEVERLDNGTSVKMDQHRGFLHNQAKNLLCGFYGRHAELLFLDLVESLQLDPAQIYRVTWFISWSPCFSWGCAGEVRAFLQENTHVRLRIFAARIADHWPLYKEALQMLRDAGAQVSIMTYDEFKHCWDTFVDHQGAPFQPWDGLDEHSQALSGRLRAILQNQGN

SEQ ID NO: 428 - protein, 199 aa, synthetic construct
MEASPASGPRHLMDPHIFYSNFNNGIGRHKTYLCYEVERLDNGTSVKMDQHRGFLHNQAKNLLCGFYGRHAELLFLDLVYSLQLDPAQIYRVTWFISWSPCFSWGCAGEVRAFLQENTHVRLRIFAARIADHWPLYKEALQMLRDAGAQVSIMTYDEFKHCWDTFVDHQGAPFQPWDGLDEHSQALSGRLRAILQNQGN

SEQ ID NO: 429 - protein, 199 aa, synthetic construct
MEASPASGPRHLMDPHIFYSNFNNGIGRHKTYLCYEVERLDNGTSVKMDQHRGFLHNQAKNLLCGFYGRHAELLFLDLVDSLQLDPAQIYRVTWFISWSPCFSWGCAGEVRAFLQENTHVRLRIFAARIADHWPLYKEALQMLRDAGAQVSIMTYDEFKHCWDTFVDHQGAPFQPWDGLDEHSQALSGRLRAILQNQGN

SEQ ID NO: 430 - protein, 199 aa, synthetic construct
MEASPASGPRHLMDPHIFYSNFNNGIGRHKTYLCYEVERLDNGTSVKMDQHRGFLHNQAKNLLCGFYGRHAELLFLDLVHSLQLDPAQIYRVTWFISWSPCFSWGCAGEVRAFLQENTHVRLRIFAARIADHWPLYKEALQMLRDAGAQVSIMTYDEFKHCWDTFVDHQGAPFQPWDGLDEHSQALSGRLRAILQNQGN

SEQ ID NO: 431 - protein, 199 aa, synthetic construct
MEASPASGPRHLMDPHIFYSNFNNGIGRHKTYLCYEVERLDNGTSVKMDQHRGFLHNQAKNLLCGFYGRHAELLFLDLVQSLQLDPAQIYRVTWFISWSPCFSWGCAGEVRAFLQENTHVRLRIFAARIADHWPLYKEALQMLRDAGAQVSIMTYDEFKHCWDTFVDHQGAPFQPWDGLDEHSQALSGRLRAILQNQGN

SEQ ID NO: 432 - protein, 199 aa, synthetic construct
MEASPASGPRHLMDPHIFYSNFNNGIGRHKTYLCYEVERLDNGTSVKMDQHRGFLHNQAKNLLCGFYGRHAELLFLDLVTSLQLDPAQIYRVTWFISWSPCFSWGCAGEVRAFLQENTHVRLRIFAARIADHWPLYKEALQMLRDAGAQVSIMTYDEFKHCWDTFVDHQGAPFQPWDGLDEHSQALSGRLRAILQNQGN

SEQ ID NO: 433 - protein, 199 aa, synthetic construct
MEASPASGPRHLMDPHIFYSNFNNGIGRHKTYLCYEVERLDNGTSVKMDQHRGFLHNQAKNLLCGFYGRHAELLFLDLVVSLQLDPAQIYRVTWFISWSPCFSWGCAGEVRAFLQENTHVRLRIFAARIADHWPLYKEALQMLRDAGAQVSIMTYDEFKHCWDTFVDHQGAPFQPWDGLDEHSQALSGRLRAILQNQGN

SEQ ID NO: 434 - protein, 199 aa, synthetic construct
MEASPASGPRHLMDPHIFYSNFNNGIGRHKTYLCYEVERLDNGTSVKMDQHRGFLHNQAKNLLCGFYGRHAELLFLDLVPSLQLDPRQIYRVTWFISWSPCFSWGCAGEVRAFLQENTHVRLRIFAARIADHWPLYKEALQMLRDAGAQVSIMTYDEFKHCWDTFVDHQGAPFQPWDGLDEHSQALSGRLRAILQNQGN

SEQ ID NO: 435 - protein, 199 aa, synthetic construct
MEASPASGPRHLMDPHIFYSNFNNGIGRHKTYLCYEVERLDNGTSVKMDQHRGFLHNQAKNLLCGFYGRHAELLFLDLVPSLQLDPAQIYRVTWFISWSPCFFWGCAGEVRAFLQENTHVRLRIFAARIADHWPLYKEALQMLRDAGAQVSIMTYDEFKHCWDTFVDHQGAPFQPWDGLDEHSQALSGRLRAILQNQGN

SEQ ID NO: 436 - protein, 199 aa, synthetic construct
MEASPASGPRHLMDPHIFYSNFNNGIGRHKTYLCYEVERLDNGTSVKMDQHRGFLHNQAKNLLCGFYGRHAELLFLDLVPSLQLDPAQIYRVTWFISWSPCFYWGCAGEVRAFLQENTHVRLRIFAARIADHWPLYKEALQMLRDAGAQVSIMTYDEFKHCWDTFVDHQGAPFQPWDGLDEHSQALSGRLRAILQNQGN

SEQ ID NO: 437 - protein, 199 aa, synthetic construct
MEASPASGPRHLMDPHIFYSNFNNGIGRHKTYLCYEVERLDNGTSVKMDQHRGFLHNQAKNLLCGFYGRHAELLFLDLVPSLQLDPAQIYRVTWFISWSPCFSWGCAEEVRAFLQENTHVRLRIFAARIADHWPLYKEALQMLRDAGAQVSIMTYDEFKHCWDTFVDHQGAPFQPWDGLDEHSQALSGRLRAILQNQGN

SEQ ID NO: 438 - protein, 199 aa, synthetic construct
MEASPASGPRHLMDPHIFYSNFNNGIGRHKTYLCYEVERLDNGTSVKMDQHRGFLHNQAKNLLCGFYGRHAELLFLDLVPSLQLDPAQIYRVTWFISWSPCFSWGCADEVRAFLQENTHVRLRIFAARIADHWPLYKEALQMLRDAGAQVSIMTYDEFKHCWDTFVDHQGAPFQPWDGLDEHSQALSGRLRAILQNQGN

SEQ ID NO: 439 - protein, 199 aa, synthetic construct
MEASPASGPRHLMDPHIFYSNFNNGIGRHKTYLCYEVERLDNGTSVKMDQHRGFLHNQAKNLLCGFYGRHAELLFLDLVPSLQLDPAQIYRVTWFISWSPCFSWGCAQEVRAFLQENTHVRLRIFAARIADHWPLYKEALQMLRDAGAQVSIMTYDEFKHCWDTFVDHQGAPFQPWDGLDEHSQALSGRLRAILQNQGN

SEQ ID NO: 440 - protein, 199 aa, synthetic construct
MEASPASGPRHLMDPHIFYSNFNNGIGRHKTYLCYEVERLDNGTSVKMDQHRGFLHNQAKNLLCGFYGRHAELLFLDLVPSLQLDPAQIYRVTWFISWSPCFSWGCAYEVRAFLQENTHVRLRIFAARIADHWPLYKEALQMLRDAGAQVSIMTYDEFKHCWDTFVDHQGAPFQPWDGLDEHSQALSGRLRAILQNQGN

SEQ ID NO: 441 - protein, 199 aa, synthetic construct
MEASPASGPRHLMDPHIFYSNFNNGIGRHKTYLCYEVERLDNGTSVKMDQHRGFLHNQAKNLLCGFYGRHAELLFLDLVPSLQLDPAQIYRVTWFISWSPCFSWGCAHEVRAFLQENTHVRLRIFAARIADHWPLYKEALQMLRDAGAQVSIMTYDEFKHCWDTFVDHQGAPFQPWDGLDEHSQALSGRLRAILQNQGN

SEQ ID NO: 442 - protein, 199 aa, synthetic construct
MEASPASGPRHLMDPHIFYSNFNNGIGRHKTYLCYEVERLDNGTSVKMDQHRGFLHNQAKNLLCGFYGRHAELLFLDLVPSLQLDPAQIYRVTWFISWSPCFSWGCALEVRAFLQENTHVRLRIFAARIADHWPLYKEALQMLRDAGAQVSIMTYDEFKHCWDTFVDHQGAPFQPWDGLDEHSQALSGRLRAILQNQGN

SEQ ID NO: 443 - protein, 199 aa, synthetic construct
MEASPASGPRHLMDPHIFYSNFNNGIGRHKTYLCYEVERLDNGTSVKMDQHRGFLHNQAKNLLCGFYGRHAELLFLDLVPSLQLDPAQIYRVTWFISWSPCFSWGCAKEVRAFLQENTHVRLRIFAARIADHWPLYKEALQMLRDAGAQVSIMTYDEFKHCWDTFVDHQGAPFQPWDGLDEHSQALSGRLRAILQNQGN

SEQ ID NO: 444 - protein, 199 aa, synthetic construct
MEASPASGPRHLMDPHIFYSNFNNGIGRHKTYLCYEVERLDNGTSVKMDQHRGFLHNQAKNLLCGFYGRHAELLFLDLVPSLQLDPAQIYRVTWFISWSPCFSWGCAREVRAFLQENTHVRLRIFAARIADHWPLYKEALQMLRDAGAQVSIMTYDEFKHCWDTFVDHQGAPFQPWDGLDEHSQALSGRLRAILQNQGN

SEQ ID NO: 445 - protein, 199 aa, synthetic construct
MEASPASGPRHLMDPHIFYSNFNNGIGRHKTYLCYEVERLDNGTSVKMDQHRGFLHNQAKNLLCGFYGRHAELLFLDLVPSLQLDPAQIYRVTWFISWSPCFSWGCAGEVRAFLQENTHVRLRIFVARIADHWPLYKEALQMLRDAGAQVSIMTYDEFKHCWDTFVDHQGAPFQPWDGLDEHSQALSGRLRAILQNQGN

SEQ ID NO: 446 - protein, 199 aa, synthetic construct
MEASPASGPRHLMDPHIFYSNFNNGIGRHKTYLCYEVERLDNGTSVKMDQHRGFLHNQAKNLLCGFYGRHAELLFLDLVPSLQLDPAQIYRVTWFISWSPCFSWGCAGEVRAFLQENTHVRLRIFAARIADHWPLYKEALQMLRDAGAQVSIMTYDWFKHCWDTFVDHQGAPFQPWDGLDEHSQALSGRLRAILQNQGN

SEQ ID NO: 447 - protein, 199 aa, synthetic construct
MEASPASGPRHLMDPHIFYSNFNNGIGRHKTYLCYEVERLDNGTSVKMDQHRGFLHNQAKNLLCGFYGRHAELLFLDLVPSLQLDPAQIYRVTWFISWSPCFSWGCAGEVRAFLQENTHVRLRIFAARIADHWPLYKEALQMLRDAGAQVSIMTYDEFKHVWDTFVDHQGAPFQPWDGLDEHSQALSGRLRAILQNQGN

SEQ ID NO: 448 - protein, 199 aa, synthetic construct
MEASPASGPRHLMDPHIFYSNFNNGIGRHKTYLCYEVERLDNGTSVKMDQHRGFLHNQAKNLLCGFYGRHAELLFLDLVPSLQLDPAQIYRVTWFISWSPCFSWGCAGEVRAFLQENTHVRLRIFAARIADHWPLYKEALQMLRDAGAQVSIMTYDEFKHIWDTFVDHQGAPFQPWDGLDEHSQALSGRLRAILQNQGN

SEQ ID NO: 449 - protein, 199 aa, synthetic construct
MEASPASGPRHLMDPHIFYSNFNNGIGRHKTYLCYEVERLDNGTSVKMDQHRGFLHNQAKNLLCGFYGRHAELLFLDLVPSLQLDPAQIYRVTWFISWSPCFSWGCAGEVRAFLQENTHVRLRIFAARIADHWPLYKEALQMLRDAGAQVSIMTYDEFKHLWDTFVDHQGAPFQPWDGLDEHSQALSGRLRAILQNQGN

SEQ ID NO: 450 - protein, 199 aa, synthetic construct
MEASPASGPRHLMDPHIFYSNFNNGIGRHKTYLCYEVERLDNGTSVKMDQHRGFLHNQAKNLLCGFYGRHAELLFLDLVPSLQLDPAQIYRVTWFISWSPCFSWGCAGEVRAFLQENTHVRLRIFAARIADHWPLYKEALQMLRDAGAQVSIMTYDEFKHCWDIFVDHQGAPFQPWDGLDEHSQALSGRLRAILQNQGN

SEQ ID NO: 451 - protein, 199 aa, synthetic construct
MEASPASGPRHLMDPHIFYSNFNNGIGRHKTYLCYEVERLDNGTSVKMDQHRGFLHNQAKNLLCGFYGRHAELLFLDLVPSLQLDPAQIYRVTWFISWSPCFSWGCAGEVRAFLQENTHVRLRIFAARIADHWPLYKEALQMLRDAGAQVSIMTYDEFKHCWDTFVDHQGIPFQPWDGLDEHSQALSGRLRAILQNQGN

SEQ ID NO: 452 - protein, 199 aa, synthetic construct
MEASPASGPRHLMDPHIFYSNFNNGIGRHKTYLCYEVERLDNGTSVKMDQHRGFLHNQAKNLLCGFYGRHAELLFLDLVPSLQLDPAQIYRVTWFISWSPCFSWGCAGEVRAFLQENTHVRLRIFAARIADHWPLYKEALQMLRDAGAQVSIMTYDEFKHCWDTFVDHQGAPFQPWDGLDEHYQALSGRLRAILQNQGN

SEQ ID NO: 453 - protein, 199 aa, synthetic construct
MEASPASGPRHLMDPHIFYSNFNNGIGRHKTYLCYEVERLDNGTSVKMDQHRGFLHNQAKNLLCGFYGRHAELLFLDLVPSLQLDPAQIYRVTWFISWSPCFSWGCAGEVRAFLQENTHVRLRIFAARIADHWPLYKEALQMLRDAGAQVSIMTYDEFKHCWDTFVDHQGAPFQPWDGLDEHFQALSGRLRAILQNQGN

SEQ ID NO: 454 - protein, 199 aa, synthetic construct
MEASPASGPRHLMDPHIFYSNFNNGIGRHKTYLCYEVERLDNGTSVKMDQHRGFLHNQAKNLLCGFYGRHAELLFLDLVPSLQLDPAQIYRVTWFISWSPCFSWGCAGEVRAFLQENTHVRLRIFAARIADHWPLYKEALQMLRDAGAQVSIMTYDEFKHCWDTFVDHQGAPFQPWDGLDEHWQALSGRLRAILQNQGN

SEQ ID NO: 455 - protein, 199 aa, synthetic construct
MEASPASGPRHLMDPHIFYSNFNNGIGRHKTYLCYEVERLDNGTSVKMDQHRGFLHNQAKNLLCGFYGRHAELLFLDLVPSLQLDPAQIYRVTWFISWSPCFSWGCAGEVRAFLQENTHVRLRIFAARIADHWPLYKEALQMLRDAGAQVSIMTYDEFKHCWDTFVDHQGAPFQPWDGLDEHSQHLSGRLRAILQNQGN

SEQ ID NO: 456 - protein, 199 aa, synthetic construct
MEASPASGPRHLMDPHIFYSNFNNGIGRHKTYLCYEVERLDNGTSVKMDQHRGFLHNQAKNLLCGFYGRHAELLFLDLVPSLQLDPAQIYRVTWFISWSPCFSWGCAGEVRAFLQENTHVRLRIFAARIADHWPLYKEALQMLRDAGAQVSIMTYDEFKHCWDTFVDHQGAPFQPWDGLDEHSQILSGRLRAILQNQGN

SEQ ID NO: 457 - protein, 199 aa, synthetic construct
MEASPASGPRHLMDPHIFYSNFNNGIGRHKTYLCYEVERLDNGTSVKMDQHRGFLHNQAKNLLCGFYGRHAELLFLDLVPSLQLDPAQIYRVTWFISWSPCFSWGCAGEVRAFLQENTHVRLRIFAARIADHWPLYKEALQMLRDAGAQVSIMTYDEFKHCWDTFVDHQGAPFQPWDGLDEHSQALIGRLRAILQNQGN

SEQ ID NO: 458 - protein, 199 aa, synthetic construct
MEASPASGPRHLMDPHIFYSNFNNGIGRHKTYLCYEVERLDNGTSVKMDQHRGFLHNQAKNLLCGFYGRHAELLFLDLVPSLQLDPAQIYRVTWFISWSPCFSWGCAGEVRAFLQENTHVRLRIFAARIADHWPLYKEALQMLRDAGAQVSIMTYDEFKHCWDTFVDHQGAPFQPWDGLDEHSQALWGRLRAILQNQGN

SEQ ID NO: 459 - protein, 199 aa, synthetic construct
MEASPASGPRHLMDPHIFYSNFNNGIGRHKTYLCYEVERLDNGTSVKMDQHRGFLHNQAKNLLCGFYGRHAELLFLDLVPSLQLDPAQIYRVTWFISWSPCFSWGCAGEVRAFLQENTHVRLRIFAARIADHWPLYKEALQMLRDAGAQVSIMTYDEFKHCWDTFVDHQGAPFQPWDGLDEHSQALSLRLRAILQNQGN

SEQ ID NO: 460 - protein, 199 aa, synthetic construct
MEASPASGPRHLMDPHIFYSNFNNGIGRHKTYLCYEVERLDNGTSVKMDQHRGFLHNQAKNLLCGFYGRHAELLFLDLVPSLQLDPAQIYRVTWFISWSPCFSWGCAGEVRAFLQENTHVRLRIFAARIADHWPLYKEALQMLRDAGAQVSIMTYDEFKHCWDTFVDHQGAPFQPWDGLDEHSQALSGRLRAILQPQGN

SEQ ID NO: 461 - protein, 199 aa, synthetic construct
MEASPASGPRHLMDPHIFYSNFNNGIGRHKTYLCYEVERLDNGTSVKMDQHRGFLHNQAPNLLCGFYGRHAELLFLDLVPSLQLDPAQIYRVTWFISWSPCFSWGCAGEVRAFLQENTHVRLRIFAARIADHWPLYKEALQMLRDAGAQVSIMTYDEFKHCWDTFVDHQGAPFQPWDGLDEHSQALSGRLRAILQNQGN

SEQ ID NO: 462 - protein, 199 aa, synthetic construct
MEASPASGPRHLMDPHIFYSNFNNGIGRHKTYLCYEVERLDNGTSVKMDQHRGFLHNQAKNLLCGFYGRHAELLFLDLVPSLQLDPAQIYRVTWFISWSPCFSWGCAGEVRAFLQENTHVRLRIFAARIADHWPLYKEALQMLRDAGAQVSIMTYDEFKHMWDTFVDHQGAPFQPWDGLDEHSQALSGRLRAILQNQGN

SEQ ID NO: 463 - protein, 199 aa, synthetic construct
MEASPASGPRHLMDPHIFYSNFNNGIGRHKTYLCYEVERLDNGTSVKMDQHRGFLHNQAKNLLCGFYGRHAELLFLDLVPSLQLDPAQIYRVTWFISWSPCFSWGCAGEVRAFLQENTHVRLRIFAARIADHWPLYKEALQMLRDAGAQVSIMTYDEFKHCWDTFVDHQGAPFQPWDGLDEHSQFLSGRLRAILQNQGN

SEQ ID NO: 464 - protein, 199 aa, synthetic construct
MEASPASGPRHLMDPHIFYSNFNNGIGRHKTYLCYEVERLDNGTSVKMDQHRGFLHNQAKNLLCGFYGRHAELLFLDLVPSLQLDPAQIYRVTWFISWSPCFSWGCAMEVRAFLQENTHVRLRIFAARIADHWPLYKEALQMLRDAGAQVSIMTYDEFKHCWDTFVDHQGAPFQPWDGLDEHSQALSGRLRAILQNQGN

SEQ ID NO: 465 - protein, 199 aa, synthetic construct
MEASPASGPRHLMDPHIFYSNFNNGIGRHKTYLCYEVERLDNGTSVKMDQHRGFLHNQAKNLLCGFYGRHAELLFLDLVPSLQLDPAQIYRVIWFISWSPCFSWGCAGEVRAFLQENTHVRLRIFAARIADHWPLYKEALQMLRDAGAQVSIMTYDEFKHCWDTFVDHQGAPFQPWDGLDEHSQALSGRLRAILQNQGN

SEQ ID NO: 466 - protein, 199 aa, synthetic construct
MEASPASGPRHLMDPHIFYSNFNNGIGRHKTYLCYEVERLDNGTSVKMDQHRGFLHNQAKNLLCGFYGRHAELLFLDLVPSLQLDPAQIYRVTWFISWSPCFSWGCAGEVRAFLQEWTHVRLRIFAARIADHWPLYKEALQMLRDAGAQVSIMTYDEFKHCWDTFVDHQGAPFQPWDGLDEHSQALSGRLRAILQNQGN

SEQ ID NO: 467 - protein, 199 aa, synthetic construct
MEASPASGPRHLMDPHIFYSNFNNGIGRHKTYLCYEVERLDNGTSVKMDQHRGFLHDQAKNLLCGFYGRHAELLFLDLVPSLQLDPAQIYRVTWFISWSPCFSWGCAGEVRAFLQENTHVRLRIFAARIADHWPLYKEALQMLRDAGAQVSIMTYDEFKHCWDTFVDHQGAPFQPWDGLDEHSQALSGRLRAILQNQGN

SEQ ID NO: 468 - protein, 199 aa, synthetic construct
MEASPASGPRHLMDPHIFYSNFNNGIGRHKTYLCYEVERLDNGTSVKMDQHRGFLHNQAKNLLCGFYGRHAELLFLDLVPSLQLDPAQIYRVTWFISWSPCFSWGCAWEVRAFLQENTHVRLRIFAARIADHWPLYKEALQMLRDAGAQVSIMTYDEFKHCWDTFVDHQGAPFQPWDGLDEHSQALSGRLRAILQNQGN

SEQ ID NO: 469 - protein, 199 aa, synthetic construct
MEASPASGPRHLMDPHIFYSNFNNGIGRHKFYLCYEVERLDNGTSVKMDQHRGFLHNQAKNLLCGFYGRHAELLFLDLVPSLQLDPAQIYRVTWFISWSPCFSWGCAGEVRAFLQENTHVRLRIFAARIADHWPLYKEALQMLRDAGAQVSIMTYDEFKHCWDTFVDHQGAPFQPWDGLDEHSQALSGRLRAILQNQGN

SEQ ID NO: 470 - protein, 199 aa, synthetic construct
MEASPASGPRLLMDPHIFYSNFNNGIGRHKTYLCYEVERLDNGTSVKMDQHRGFLHNQAKNLLCGFYGRHAELLFLDLVPSLQLDPAQIYRVTWFISWSPCFSWGCAGEVRAFLQENTHVRLRIFAARIADHWPLYKEALQMLRDAGAQVSIMTYDEFKHCWDTFVDHQGAPFQPWDGLDEHSQALSGRLRAILQNQGN

SEQ ID NO: 471 - protein, 199 aa, synthetic construct
MEASPASGPRHLMDPHIFYSNFNNGIGRHKTYLCYEVERLDNGTSVKMDQHRGFLHNQAKNLLCGFYGRHAELLFLDLVPSLQLDPAQIYRVTWFISWSPCFSWGCAGEVRAFLQENTWVRLRIFAARIADHWPLYKEALQMLRDAGAQVSIMTYDEFKHCWDTFVDHQGAPFQPWDGLDEHSQALSGRLRAILQNQGN

SEQ ID NO: 472 - protein, 199 aa, synthetic construct
MEASPASGPRHLMDPHIFYSNFNNGIGRHKTYLCYEVERLDNGTSVKMDQHRGFLHNQAKNLLCGFYGRHAELLFLDLVPSLQLDPAQIYRVTWFISWSPCFSWGCAGEVRAFLQENPHVRLRIFAARIADHWPLYKEALQMLRDAGAQVSIMTYDEFKHCWDTFVDHQGAPFQPWDGLDEHSQALSGRLRAILQNQGN

SEQ ID NO: 473 - protein, 199 aa, synthetic construct
MEASPASGPRHLMDPHIFYSNFNNGIGRHKTYLCYEVELLDNGTSVKMDQHRGFLHNQAKNLLCGFYGRHAELLFLDLVPSLQLDPAQIYRVTWFISWSPCFSWGCAGEVRAFLQENTHVRLRIFAARIADHWPLYKEALQMLRDAGAQVSIMTYDEFKHCWDTFVDHQGAPFQPWDGLDEHSQALSGRLRAILQNQGN

SEQ ID NO: 474 - protein, 199 aa, synthetic construct
MEASPASGPRHLMDPHIFYSNFNNGIGRHKTYLCYEVERLDNGTSVKMDQHRGFLHNQAKNLLCGFYGRHAELLFLDLVPSLQLDPAQIYRVTWFISWSPCFSWGIAGEVRAFLQENTHVRLRIFAARIADHWPLYKEALQMLRDAGAQVSIMTYDEFKHCWDTFVDHQGAPFQPWDGLDEHSQALSGRLRAILQNQGN

SEQ ID NO: 475 - protein, 199 aa, synthetic construct
MEASPASGPRHLMDPHIFYSNFNNGIGRHKTYLCYEVERLDNGTSVKMDQHRGFLHNQAKNLLCGFYGRHAELLFLDLVPSLQLDPAQIYRVTWFISWSPCFHWGCAGEVRAFLQENTHVRLRIFAARIADHWPLYKEALQMLRDAGAQVSIMTYDEFKHCWDTFVDHQGAPFQPWDGLDEHSQALSGRLRAILQNQGN

SEQ ID NO: 476 - protein, 199 aa, synthetic construct
MEASPASGPRHLMDPHIFYSNFNNGIGRHKTYLCYEVERLDNGTSVKMDQHRGFLHNQAKNLLCGFYGRHAELLFLDLVPSLQLDPAQIYRVTWFISWSPCFSWGCAGEVRAFLQENTHVRLRIFAARIADHWPLYKEALQMLRDAGAQVSIMTYDEFKHCWDTFVDHQGAPFQPWDGLDEHSQALEGRLRAILQNQGN

SEQ ID NO: 477 - protein, 199 aa, synthetic construct
MEASPASGPRHLMDPHIFYSNFNNGIGRHKTYLCYEVERLDNGTSVKMDQHRGFLHNQAKNLLCGFYGRHAELLFLDLVPSLQLDPAQIYRVTWFISWSPCFSWGCAGEVRAFLQENTHVRLRIFFARIADHWPLYKEALQMLRDAGAQVSIMTYDEFKHCWDTFVDHQGAPFQPWDGLDEHSQALSGRLRAILQNQGN

SEQ ID NO: 478 - protein, 199 aa, synthetic construct
MEASPASGPRHLMDPHIFYSNFNNGILRHKTYLCYEVERLDNGTSVKMDQHRGFLHNQAKNLLCGFYGRHAELLFLDLVPSLQLDPAQIYRVTWFISWSPCFSWGCAGEVRAFLQENTHVRLRIFAARIADHWPLYKEALQMLRDAGAQVSIMTYDEFKHCWDTFVDHQGAPFQPWDGLDEHSQALSGRLRAILQNQGN

SEQ ID NO: 479 - protein, 199 aa, synthetic construct
MEASPASGPRHLMDPHIFYSNFNNGIGRHKTYLCYEVERLDNGTSVPMDQHRGFLHNQAKNLLCGFYGRHAELLFLDLVPSLQLDPAQIYRVTWFISWSPCFSWGCAGEVRAFLQENTHVRLRIFAARIADHWPLYKEALQMLRDAGAQVSIMTYDEFKHCWDTFVDHQGAPFQPWDGLDEHSQALSGRLRAILQNQGN

SEQ ID NO: 480 - protein, 199 aa, synthetic construct
MEASPASGPRHLMDPHIFYSNFNNGIGRHKWYLCYEVERLDNGTSVKMDQHRGFLHNQAKNLLCGFYGRHAELLFLDLVPSLQLDPAQIYRVTWFISWSPCFSWGCAGEVRAFLQENTHVRLRIFAARIADHWPLYKEALQMLRDAGAQVSIMTYDEFKHCWDTFVDHQGAPFQPWDGLDEHSQALSGRLRAILQNQGN

SEQ ID NO: 481 - protein, 199 aa, synthetic construct
MEASPASGPRHLMDPHIFYSNFNNGIGRHKTYLCYEVERLDNGTSVKMDQHRGFLHNQAKNLLCGFYGRHAELLFLDLVPSLQLDPAQIYRVTWFISWSPCFRWGCAGEVRAFLQENTHVRLRIFAARIADHWPLYKEALQMLRDAGAQVSIMTYDEFKHCWDTFVDHQGAPFQPWDGLDEHSQALSGRLRAILQNQGN

SEQ ID NO: 482 - protein, 199 aa, synthetic construct
MEASPASGPRHLMDPHIFYSNFNNGIGRHKTYLCYEVERLDNGTSVKMDQHRGFLHNQAKNLLCGFYGRHAELLFLDLVPSLQLDPAQIYRVTWFISWSPCFSWGCAGEVRAFLQENTHVRLRIFIARIADHWPLYKEALQMLRDAGAQVSIMTYDEFKHCWDTFVDHQGAPFQPWDGLDEHSQALSGRLRAILQNQGN

SEQ ID NO: 483 - protein, 199 aa, synthetic construct
MEASPASGPRHLMDPHIFYSNFNNGIGRHKTYLCYEVERLDNGTSVKMDQHRGFLHNQAKNLLCGFYGRHAELLFLDLVPSLQLDPAQIYRVTWFISWSPCFSWLCAGEVRAFLQENTHVRLRIFAARIADHWPLYKEALQMLRDAGAQVSIMTYDEFKHCWDTFVDHQGAPFQPWDGLDEHSQALSGRLRAILQNQGN

SEQ ID NO: 484 - protein, 199 aa, synthetic construct
MEASPASGPRHLMDPHIFYSNFNNGIGRHKTYLCYEVERLDNGTSVKMDQHRGFLHNQAKNLLCGFYGRHAELLFLDLVPSLQLDPAQIYRVTWFISWSPCFSWGSAGEVRAFLQENTHVRLRIFAARIADHWPLYKEALQMLRDAGAQVSIMTYDEFKHCWDTFVDHQGAPFQPWDGLDEHSQALSGRLRAILQNQGN

SEQ ID NO: 485 - protein, 199 aa, synthetic construct
MEASPASGPRHLMDPHIFYSNFNNGIGRHKTYLCYEVERLDNGTSVKMDQHRGFLHNQAKNLLCGFYGRHAELLFLDLVPSLQLDPAQIYRVTWFISWSPCFSWGCAGEVRAFLQENTHVRLRIFLARIADHWPLYKEALQMLRDAGAQVSIMTYDEFKHCWDTFVDHQGAPFQPWDGLDEHSQALSGRLRAILQNQGN

SEQ ID NO: 486 - protein, 199 aa, synthetic construct
MEASPASGPRHLMDPHIFYSWFNNGIGRHKTYLCYEVERLDNGTSVKMDQHRGFLHNQAKNLLCGFYGRHAELLFLDLVPSLQLDPAQIYRVTWFISWSPCFSWGCAGEVRAFLQENTHVRLRIFAARIADHWPLYKEALQMLRDAGAQVSIMTYDEFKHCWDTFVDHQGAPFQPWDGLDEHSQALSGRLRAILQNQGN

SEQ ID NO: 487 - skipped

SEQ ID NO: 488 - protein, 199 aa, synthetic construct
MEASPASGPRHLMDPHIFYSNFNNGIGRHKTYLCYEVERLDNGTWVKMDQHRGFLHNQAKNLLCGFYGRHAELLFLDLVPSLQLDPAQIYRVTWFISWSPCFSWGCAGEVRAFLQENTHVRLRIFAARIADHWPLYKEALQMLRDAGAQVSIMTYDEFKHCWDTFVDHQGAPFQPWDGLDEHSQALSGRLRAILQNQGN

SEQ ID NO: 489 - protein, 199 aa, synthetic construct
MEASPASGPRHLMDPHIFYSNFNNRIGRHKTYLCYEVERLDNGTSVKMDQHRGFLHNQAKNLLCGFYGRHAELLFLDLVPSLQLDPAQIYRVTWFISWSPCFSWGCAGEVRAFLQENTHVRLRIFAARIADHWPLYKEALQMLRDAGAQVSIMTYDEFKHCWDTFVDHQGAPFQPWDGLDEHSQALSGRLRAILQNQGN

SEQ ID NO: 490 - protein, 199 aa, synthetic construct
MEASPASGPRHLMDPHIFYSNFNNRIGRHKTYLCYEVERLDNGTWVKMDQHRGFLHNQAKNLLCGFYGRHAELLFLDLVPSLQLDPAQIYRVTWFISWSPCFSWGCAGEVRAFLQENTHVRLRIFAARIADHWPLYKEALQMLRDAGAQVSIMTYDEFKHCWDTFVDHQGAPFQPWDGLDEHSQALSGRLRAILQNQGN

SEQ ID NO: 491 - protein, 199 aa, synthetic construct
MEASPASGPRHLMDPHIFYSNFNNKIGRHKTYLCYEVERLDNGTSVKMDQHRGFLHNQAKNLLCGFYGRHAELLFLDLVPSLQLDPAQIYRVTWFISWSPCFSWGCAGEVRAFLQENTHVRLRIFAARIADHWPLYKEALQMLRDAGAQVSIMTYDEFKHCWDTFVDHQGAPFQPWDGLDEHSQALSGRLRAILQNQGN

SEQ ID NO: 492 - protein, 199 aa, synthetic construct
MEASPASGPRHLMDPHIFYSNFNNKIGRHKTYLCYEVERLDNGTWVKMDQHRGFLHNQAKNLLCGFYGRHAELLFLDLVPSLQLDPAQIYRVTWFISWSPCFSWGCAGEVRAFLQENTHVRLRIFAARIADHWPLYKEALQMLRDAGAQVSIMTYDEFKHCWDTFVDHQGAPFQPWDGLDEHSQALSGRLRAILQNQGN

SEQ ID NO: 493 - protein, 199 aa, synthetic construct
MEASPASGPRHLMDPHIFYSNFNNGIGRHKTYLCYEVERLDNGTSVKMDQHRGFLHNQAKNLLCGFYGRHAELLFLDLVPSLQLDPAQIYRVTWFISWSPCFSWGCAGEVRAFLQENTHVRLRIFAARIADHWPLYKEALQMLRDAGAQVSIMTYDEFKHCWDTFVDHQGAPFQPWDGLDEHSQALSQRLRAILQNQGN

SEQ ID NO: 494 - protein, 199 aa, synthetic construct
MEASPASGPRHLMDPHIFYSNFNNGIGRHKTYLCYEVERLDNGTWVKMDQHRGFLHNQAKNLLCGFYGRHAELLFLDLVPSLQLDPAQIYRVTWFISWSPCFSWGCAGEVRAFLQENTHVRLRIFAARIADHWPLYKEALQMLRDAGAQVSIMTYDEFKHCWDTFVDHQGAPFQPWDGLDEHSQALSQRLRAILQNQGN

SEQ ID NO: 495 - protein, 199 aa, synthetic construct
MEASPASGPRHLMDPHIFYSNFNNRIGRHKTYLCYEVERLDNGTSVKMDQHRGFLHNQAKNLLCGFYGRHAELLFLDLVPSLQLDPAQIYRVTWFISWSPCFSWGCAGEVRAFLQENTHVRLRIFAARIADHWPLYKEALQMLRDAGAQVSIMTYDEFKHCWDTFVDHQGAPFQPWDGLDEHSQALSQRLRAILQNQGN

SEQ ID NO: 496 - protein, 199 aa, synthetic construct
MEASPASGPRHLMDPHIFYSNFNNRIGRHKTYLCYEVERLDNGTWVKMDQHRGFLHNQAKNLLCGFYGRHAELLFLDLVPSLQLDPAQIYRVTWFISWSPCFSWGCAGEVRAFLQENTHVRLRIFAARIADHWPLYKEALQMLRDAGAQVSIMTYDEFKHCWDTFVDHQGAPFQPWDGLDEHSQALSQRLRAILQNQGN

SEQ ID NO: 497 - protein, 199 aa, synthetic construct
MEASPASGPRHLMDPHIFYSNFNNKIGRHKTYLCYEVERLDNGTSVKMDQHRGFLHNQAKNLLCGFYGRHAELLFLDLVPSLQLDPAQIYRVTWFISWSPCFSWGCAGEVRAFLQENTHVRLRIFAARIADHWPLYKEALQMLRDAGAQVSIMTYDEFKHCWDTFVDHQGAPFQPWDGLDEHSQALSQRLRAILQNQGN

SEQ ID NO: 498 - protein, 199 aa, synthetic construct
MEASPASGPRHLMDPHIFYSNFNNKIGRHKTYLCYEVERLDNGTWVKMDQHRGFLHNQAKNLLCGFYGRHAELLFLDLVPSLQLDPAQIYRVTWFISWSPCFSWGCAGEVRAFLQENTHVRLRIFAARIADHWPLYKEALQMLRDAGAQVSIMTYDEFKHCWDTFVDHQGAPFQPWDGLDEHSQALSQRLRAILQNQGN

SEQ ID NO: 499 - protein, 199 aa, synthetic construct
MEASPASGPRHLMDPHIFYSNFNNGIGRHKTYLCYEVERLDNGTSVKMDQHRGFLHNQAKNLLCGFYGRHAELLFLDLVPSLQLDPAQIYRVTWFISWSPCFSWGCAGEVRAFLQENTHVRLRIFAARIADHWPLYKEALQMLRDAGAQVSIMTYDEFKHCWDTFVDHQGAPFQPWDGLDEHSQALSARLRAILQNQGN

SEQ ID NO: 500 - protein, 199 aa, synthetic construct
MEASPASGPRHLMDPHIFYSNFNNGIGRHKTYLCYEVERLDNGTWVKMDQHRGFLHNQAKNLLCGFYGRHAELLFLDLVPSLQLDPAQIYRVTWFISWSPCFSWGCAGEVRAFLQENTHVRLRIFAARIADHWPLYKEALQMLRDAGAQVSIMTYDEFKHCWDTFVDHQGAPFQPWDGLDEHSQALSARLRAILQNQGN

SEQ ID NO: 501 - protein, 199 aa, synthetic construct
MEASPASGPRHLMDPHIFYSNFNNRIGRHKTYLCYEVERLDNGTSVKMDQHRGFLHNQAKNLLCGFYGRHAELLFLDLVPSLQLDPAQIYRVTWFISWSPCFSWGCAGEVRAFLQENTHVRLRIFAARIADHWPLYKEALQMLRDAGAQVSIMTYDEFKHCWDTFVDHQGAPFQPWDGLDEHSQALSARLRAILQNQGN

SEQ ID NO: 502 - protein, 199 aa, synthetic construct
MEASPASGPRHLMDPHIFYSNFNNRIGRHKTYLCYEVERLDNGTWVKMDQHRGFLHNQAKNLLCGFYGRHAELLFLDLVPSLQLDPAQIYRVTWFISWSPCFSWGCAGEVRAFLQENTHVRLRIFAARIADHWPLYKEALQMLRDAGAQVSIMTYDEFKHCWDTFVDHQGAPFQPWDGLDEHSQALSARLRAILQNQGN

SEQ ID NO: 503 - protein, 199 aa, synthetic construct
MEASPASGPRHLMDPHIFYSNFNNKIGRHKTYLCYEVERLDNGTSVKMDQHRGFLHNQAKNLLCGFYGRHAELLFLDLVPSLQLDPAQIYRVTWFISWSPCFSWGCAGEVRAFLQENTHVRLRIFAARIADHWPLYKEALQMLRDAGAQVSIMTYDEFKHCWDTFVDHQGAPFQPWDGLDEHSQALSARLRAILQNQGN

SEQ ID NO: 504 - protein, 199 aa, synthetic construct
MEASPASGPRHLMDPHIFYSNFNNKIGRHKTYLCYEVERLDNGTWVKMDQHRGFLHNQAKNLLCGFYGRHAELLFLDLVPSLQLDPAQIYRVTWFISWSPCFSWGCAGEVRAFLQENTHVRLRIFAARIADHWPLYKEALQMLRDAGAQVSIMTYDEFKHCWDTFVDHQGAPFQPWDGLDEHSQALSARLRAILQNQGN

SEQ ID NO: 505 - protein, 199 aa, synthetic construct
MEASPASGPRHLMDPHIFYSNFNNGIGRHKTYLCYEVERLDNGTSVKMDQHRGFLHNQAKNLLCGFYGRHAELLFLDLVPSLQLDPAQIYRVTWFISWSPCFSWGCAGEVRAFLQENTHVRLRIFAARIADHWPLYKEALQMLRDAGAQVSIMTYDEFKHCWDTFVDHQGAPFQPWDGLDEHSQALSRRLRAILQNQGN

SEQ ID NO: 506 - protein, 199 aa, synthetic construct
MEASPASGPRHLMDPHIFYSNFNNGIGRHKTYLCYEVERLDNGTWVKMDQHRGFLHNQAKNLLCGFYGRHAELLFLDLVPSLQLDPAQIYRVTWFISWSPCFSWGCAGEVRAFLQENTHVRLRIFAARIADHWPLYKEALQMLRDAGAQVSIMTYDEFKHCWDTFVDHQGAPFQPWDGLDEHSQALSRRLRAILQNQGN

SEQ ID NO: 507 - protein, 199 aa, synthetic construct
MEASPASGPRHLMDPHIFYSNFNNRIGRHKTYLCYEVERLDNGTSVKMDQHRGFLHNQAKNLLCGFYGRHAELLFLDLVPSLQLDPAQIYRVTWFISWSPCFSWGCAGEVRAFLQENTHVRLRIFAARIADHWPLYKEALQMLRDAGAQVSIMTYDEFKHCWDTFVDHQGAPFQPWDGLDEHSQALSRRLRAILQNQGN

SEQ ID NO: 508 - protein, 199 aa, synthetic construct
MEASPASGPRHLMDPHIFYSNFNNRIGRHKTYLCYEVERLDNGTWVKMDQHRGFLHNQAKNLLCGFYGRHAELLFLDLVPSLQLDPAQIYRVTWFISWSPCFSWGCAGEVRAFLQENTHVRLRIFAARIADHWPLYKEALQMLRDAGAQVSIMTYDEFKHCWDTFVDHQGAPFQPWDGLDEHSQALSRRLRAILQNQGN

SEQ ID NO: 509 - protein, 199 aa, synthetic construct
MEASPASGPRHLMDPHIFYSNFNNKIGRHKTYLCYEVERLDNGTSVKMDQHRGFLHNQAKNLLCGFYGRHAELLFLDLVPSLQLDPAQIYRVTWFISWSPCFSWGCAGEVRAFLQENTHVRLRIFAARIADHWPLYKEALQMLRDAGAQVSIMTYDEFKHCWDTFVDHQGAPFQPWDGLDEHSQALSRRLRAILQNQGN

SEQ ID NO: 510 - protein, 199 aa, synthetic construct
MEASPASGPRHLMDPHIFYSNFNNKIGRHKTYLCYEVERLDNGTWVKMDQHRGFLHNQAKNLLCGFYGRHAELLFLDLVPSLQLDPAQIYRVTWFISWSPCFSWGCAGEVRAFLQENTHVRLRIFAARIADHWPLYKEALQMLRDAGAQVSIMTYDEFKHCWDTFVDHQGAPFQPWDGLDEHSQALSRRLRAILQNQGN

SEQ ID NO: 511 - protein, 199 aa, synthetic construct
MEASPASGPRHLMDPHIFYSNFNNGIGRHKTYLCYEVERLDNGTSVKMDQHRGFLHNQAKNLLCGFYGRHAELLFLDLVPSLQLDPAQIYRVTWFISWSPCFSWGCAAEVRAFLQENTHVRLRIFAARIADHWPLYKEALQMLRDAGAQVSIMTYDEFKHCWDTFVDHQGAPFQPWDGLDEHSQALSGRLRAILQNQGN

SEQ ID NO: 512 - protein, 199 aa, synthetic construct
MEASPASGPRHLMDPHIFYSNFNNGIGRHKTYLCYEVERLDNGTWVKMDQHRGFLHNQAKNLLCGFYGRHAELLFLDLVPSLQLDPAQIYRVTWFISWSPCFSWGCAAEVRAFLQENTHVRLRIFAARIADHWPLYKEALQMLRDAGAQVSIMTYDEFKHCWDTFVDHQGAPFQPWDGLDEHSQALSGRLRAILQNQGN

SEQ ID NO: 513 - protein, 199 aa, synthetic construct
MEASPASGPRHLMDPHIFYSNFNNRIGRHKTYLCYEVERLDNGTSVKMDQHRGFLHNQAKNLLCGFYGRHAELLFLDLVPSLQLDPAQIYRVTWFISWSPCFSWGCAAEVRAFLQENTHVRLRIFAARIADHWPLYKEALQMLRDAGAQVSIMTYDEFKHCWDTFVDHQGAPFQPWDGLDEHSQALSGRLRAILQNQGN

SEQ ID NO: 514 - protein, 199 aa, synthetic construct
MEASPASGPRHLMDPHIFYSNFNNRIGRHKTYLCYEVERLDNGTWVKMDQHRGFLHNQAKNLLCGFYGRHAELLFLDLVPSLQLDPAQIYRVTWFISWSPCFSWGCAAEVRAFLQENTHVRLRIFAARIADHWPLYKEALQMLRDAGAQVSIMTYDEFKHCWDTFVDHQGAPFQPWDGLDEHSQALSGRLRAILQNQGN

SEQ ID NO: 515 - protein, 199 aa, synthetic construct
MEASPASGPRHLMDPHIFYSNFNNKIGRHKTYLCYEVERLDNGTSVKMDQHRGFLHNQAKNLLCGFYGRHAELLFLDLVPSLQLDPAQIYRVTWFISWSPCFSWGCAAEVRAFLQENTHVRLRIFAARIADHWPLYKEALQMLRDAGAQVSIMTYDEFKHCWDTFVDHQGAPFQPWDGLDEHSQALSGRLRAILQNQGN

SEQ ID NO: 516 - protein, 199 aa, synthetic construct
MEASPASGPRHLMDPHIFYSNFNNKIGRHKTYLCYEVERLDNGTWVKMDQHRGFLHNQAKNLLCGFYGRHAELLFLDLVPSLQLDPAQIYRVTWFISWSPCFSWGCAAEVRAFLQENTHVRLRIFAARIADHWPLYKEALQMLRDAGAQVSIMTYDEFKHCWDTFVDHQGAPFQPWDGLDEHSQALSGRLRAILQNQGN

SEQ ID NO: 517 - protein, 199 aa, synthetic construct
MEASPASGPRHLMDPHIFYSNFNNGIGRHKTYLCYEVERLDNGTSVKMDQHRGFLHNQAKNLLCGFYGRHAELLFLDLVPSLQLDPAQIYRVTWFISWSPCFSWGCAAEVRAFLQENTHVRLRIFAARIADHWPLYKEALQMLRDAGAQVSIMTYDEFKHCWDTFVDHQGAPFQPWDGLDEHSQALSQRLRAILQNQGN

SEQ ID NO: 518 - protein, 199 aa, synthetic construct
MEASPASGPRHLMDPHIFYSNFNNGIGRHKTYLCYEVERLDNGTWVKMDQHRGFLHNQAKNLLCGFYGRHAELLFLDLVPSLQLDPAQIYRVTWFISWSPCFSWGCAAEVRAFLQENTHVRLRIFAARIADHWPLYKEALQMLRDAGAQVSIMTYDEFKHCWDTFVDHQGAPFQPWDGLDEHSQALSQRLRAILQNQGN

SEQ ID NO: 519 - protein, 199 aa, synthetic construct
MEASPASGPRHLMDPHIFYSNFNNRIGRHKTYLCYEVERLDNGTSVKMDQHRGFLHNQAKNLLCGFYGRHAELLFLDLVPSLQLDPAQIYRVTWFISWSPCFSWGCAAEVRAFLQENTHVRLRIFAARIADHWPLYKEALQMLRDAGAQVSIMTYDEFKHCWDTFVDHQGAPFQPWDGLDEHSQALSQRLRAILQNQGN

SEQ ID NO: 520 - protein, 199 aa, synthetic construct
MEASPASGPRHLMDPHIFYSNFNNRIGRHKTYLCYEVERLDNGTWVKMDQHRGFLHNQAKNLLCGFYGRHAELLFLDLVPSLQLDPAQIYRVTWFISWSPCFSWGCAAEVRAFLQENTHVRLRIFAARIADHWPLYKEALQMLRDAGAQVSIMTYDEFKHCWDTFVDHQGAPFQPWDGLDEHSQALSQRLRAILQNQGN

SEQ ID NO: 521 - protein, 199 aa, synthetic construct
MEASPASGPRHLMDPHIFYSNFNNKIGRHKTYLCYEVERLDNGTSVKMDQHRGFLHNQAKNLLCGFYGRHAELLFLDLVPSLQLDPAQIYRVTWFISWSPCFSWGCAAEVRAFLQENTHVRLRIFAARIADHWPLYKEALQMLRDAGAQVSIMTYDEFKHCWDTFVDHQGAPFQPWDGLDEHSQALSQRLRAILQNQGN

SEQ ID NO: 522 - protein, 199 aa, synthetic construct
MEASPASGPRHLMDPHIFYSNFNNKIGRHKTYLCYEVERLDNGTWVKMDQHRGFLHNQAKNLLCGFYGRHAELLFLDLVPSLQLDPAQIYRVTWFISWSPCFSWGCAAEVRAFLQENTHVRLRIFAARIADHWPLYKEALQMLRDAGAQVSIMTYDEFKHCWDTFVDHQGAPFQPWDGLDEHSQALSQRLRAILQNQGN

SEQ ID NO: 523 - protein, 199 aa, synthetic construct
MEASPASGPRHLMDPHIFYSNFNNGIGRHKTYLCYEVERLDNGTSVKMDQHRGFLHNQAKNLLCGFYGRHAELLFLDLVPSLQLDPAQIYRVTWFISWSPCFSWGCAAEVRAFLQENTHVRLRIFAARIADHWPLYKEALQMLRDAGAQVSIMTYDEFKHCWDTFVDHQGAPFQPWDGLDEHSQALSARLRAILQNQGN

SEQ ID NO: 524 - protein, 199 aa, synthetic construct
MEASPASGPRHLMDPHIFYSNFNNGIGRHKTYLCYEVERLDNGTWVKMDQHRGFLHNQAKNLLCGFYGRHAELLFLDLVPSLQLDPAQIYRVTWFISWSPCFSWGCAAEVRAFLQENTHVRLRIFAARIADHWPLYKEALQMLRDAGAQVSIMTYDEFKHCWDTFVDHQGAPFQPWDGLDEHSQALSARLRAILQNQGN

SEQ ID NO: 525 - protein, 199 aa, synthetic construct
MEASPASGPRHLMDPHIFYSNFNNRIGRHKTYLCYEVERLDNGTSVKMDQHRGFLHNQAKNLLCGFYGRHAELLFLDLVPSLQLDPAQIYRVTWFISWSPCFSWGCAAEVRAFLQENTHVRLRIFAARIADHWPLYKEALQMLRDAGAQVSIMTYDEFKHCWDTFVDHQGAPFQPWDGLDEHSQALSARLRAILQNQGN

SEQ ID NO: 526 - protein, 199 aa, synthetic construct
MEASPASGPRHLMDPHIFYSNFNNRIGRHKTYLCYEVERLDNGTWVKMDQHRGFLHNQAKNLLCGFYGRHAELLFLDLVPSLQLDPAQIYRVTWFISWSPCFSWGCAAEVRAFLQENTHVRLRIFAARIADHWPLYKEALQMLRDAGAQVSIMTYDEFKHCWDTFVDHQGAPFQPWDGLDEHSQALSARLRAILQNQGN

SEQ ID NO: 527 - protein, 199 aa, synthetic construct
MEASPASGPRHLMDPHIFYSNFNNKIGRHKTYLCYEVERLDNGTSVKMDQHRGFLHNQAKNLLCGFYGRHAELLFLDLVPSLQLDPAQIYRVTWFISWSPCFSWGCAAEVRAFLQENTHVRLRIFAARIADHWPLYKEALQMLRDAGAQVSIMTYDEFKHCWDTFVDHQGAPFQPWDGLDEHSQALSARLRAILQNQGN

SEQ ID NO: 528 - protein, 199 aa, synthetic construct
MEASPASGPRHLMDPHIFYSNFNNKIGRHKTYLCYEVERLDNGTWVKMDQHRGFLHNQAKNLLCGFYGRHAELLFLDLVPSLQLDPAQIYRVTWFISWSPCFSWGCAAEVRAFLQENTHVRLRIFAARIADHWPLYKEALQMLRDAGAQVSIMTYDEFKHCWDTFVDHQGAPFQPWDGLDEHSQALSARLRAILQNQGN

SEQ ID NO: 529 - protein, 199 aa, synthetic construct
MEASPASGPRHLMDPHIFYSNFNNGIGRHKTYLCYEVERLDNGTSVKMDQHRGFLHNQAKNLLCGFYGRHAELLFLDLVPSLQLDPAQIYRVTWFISWSPCFSWGCAAEVRAFLQENTHVRLRIFAARIADHWPLYKEALQMLRDAGAQVSIMTYDEFKHCWDTFVDHQGAPFQPWDGLDEHSQALSRRLRAILQNQGN

SEQ ID NO: 530 - protein, 199 aa, synthetic construct
MEASPASGPRHLMDPHIFYSNFNNGIGRHKTYLCYEVERLDNGTWVKMDQHRGFLHNQAKNLLCGFYGRHAELLFLDLVPSLQLDPAQIYRVTWFISWSPCFSWGCAAEVRAFLQENTHVRLRIFAARIADHWPLYKEALQMLRDAGAQVSIMTYDEFKHCWDTFVDHQGAPFQPWDGLDEHSQALSRRLRAILQNQGN

SEQ ID NO: 531 - protein, 199 aa, synthetic construct
MEASPASGPRHLMDPHIFYSNFNNRIGRHKTYLCYEVERLDNGTSVKMDQHRGFLHNQAKNLLCGFYGRHAELLFLDLVPSLQLDPAQIYRVTWFISWSPCFSWGCAAEVRAFLQENTHVRLRIFAARIADHWPLYKEALQMLRDAGAQVSIMTYDEFKHCWDTFVDHQGAPFQPWDGLDEHSQALSRRLRAILQNQGN

SEQ ID NO: 532 - protein, 199 aa, synthetic construct
MEASPASGPRHLMDPHIFYSNFNNRIGRHKTYLCYEVERLDNGTWVKMDQHRGFLHNQAKNLLCGFYGRHAELLFLDLVPSLQLDPAQIYRVTWFISWSPCFSWGCAAEVRAFLQENTHVRLRIFAARIADHWPLYKEALQMLRDAGAQVSIMTYDEFKHCWDTFVDHQGAPFQPWDGLDEHSQALSRRLRAILQNQGN

SEQ ID NO: 533 - protein, 199 aa, synthetic construct
MEASPASGPRHLMDPHIFYSNFNNKIGRHKTYLCYEVERLDNGTSVKMDQHRGFLHNQAKNLLCGFYGRHAELLFLDLVPSLQLDPAQIYRVTWFISWSPCFSWGCAAEVRAFLQENTHVRLRIFAARIADHWPLYKEALQMLRDAGAQVSIMTYDEFKHCWDTFVDHQGAPFQPWDGLDEHSQALSRRLRAILQNQGN

SEQ ID NO: 534 - protein, 199 aa, synthetic construct; identical to SEQ ID NO: 74

SEQ ID NO: 535 - protein, 199 aa, synthetic construct
MEASPASGPRHLMDPHIFYSNFNNGIGRHKTYLCYEVERLDNGTSVKMDQHRGFLHNQAKNLLCGFYGRHAELLFLDLVPSLQLDPAQIYRVTWFISWSPCFSWGCACEVRAFLQENTHVRLRIFAARIADHWPLYKEALQMLRDAGAQVSIMTYDEFKHCWDTFVDHQGAPFQPWDGLDEHSQALSGRLRAILQNQGN

SEQ ID NO: 536 - protein, 199 aa, synthetic construct
MEASPASGPRHLMDPHIFYSNFNNGIGRHKTYLCYEVERLDNGTWVKMDQHRGFLHNQAKNLLCGFYGRHAELLFLDLVPSLQLDPAQIYRVTWFISWSPCFSWGCACEVRAFLQENTHVRLRIFAARIADHWPLYKEALQMLRDAGAQVSIMTYDEFKHCWDTFVDHQGAPFQPWDGLDEHSQALSGRLRAILQNQGN

SEQ ID NO: 537 - protein, 199 aa, synthetic construct
MEASPASGPRHLMDPHIFYSNFNNRIGRHKTYLCYEVERLDNGTSVKMDQHRGFLHNQAKNLLCGFYGRHAELLFLDLVPSLQLDPAQIYRVTWFISWSPCFSWGCACEVRAFLQENTHVRLRIFAARIADHWPLYKEALQMLRDAGAQVSIMTYDEFKHCWDTFVDHQGAPFQPWDGLDEHSQALSGRLRAILQNQGN

SEQ ID NO: 538 - protein, 199 aa, synthetic construct
MEASPASGPRHLMDPHIFYSNFNNRIGRHKTYLCYEVERLDNGTWVKMDQHRGFLHNQAKNLLCGFYGRHAELLFLDLVPSLQLDPAQIYRVTWFISWSPCFSWGCACEVRAFLQENTHVRLRIFAARIADHWPLYKEALQMLRDAGAQVSIMTYDEFKHCWDTFVDHQGAPFQPWDGLDEHSQALSGRLRAILQNQGN

SEQ ID NO: 539 - protein, 199 aa, synthetic construct
MEASPASGPRHLMDPHIFYSNFNNKIGRHKTYLCYEVERLDNGTSVKMDQHRGFLHNQAKNLLCGFYGRHAELLFLDLVPSLQLDPAQIYRVTWFISWSPCFSWGCACEVRAFLQENTHVRLRIFAARIADHWPLYKEALQMLRDAGAQVSIMTYDEFKHCWDTFVDHQGAPFQPWDGLDEHSQALSGRLRAILQNQGN

SEQ ID NO: 540 - protein, 199 aa, synthetic construct
MEASPASGPRHLMDPHIFYSNFNNKIGRHKTYLCYEVERLDNGTWVKMDQHRGFLHNQAKNLLCGFYGRHAELLFLDLVPSLQLDPAQIYRVTWFISWSPCFSWGCACEVRAFLQENTHVRLRIFAARIADHWPLYKEALQMLRDAGAQVSIMTYDEFKHCWDTFVDHQGAPFQPWDGLDEHSQALSGRLRAILQNQGN

SEQ ID NO: 541 - protein, 199 aa, synthetic construct
MEASPASGPRHLMDPHIFYSNFNNGIGRHKTYLCYEVERLDNGTSVKMDQHRGFLHNQAKNLLCGFYGRHAELLFLDLVPSLQLDPAQIYRVTWFISWSPCFSWGCACEVRAFLQENTHVRLRIFAARIADHWPLYKEALQMLRDAGAQVSIMTYDEFKHCWDTFVDHQGAPFQPWDGLDEHSQALSQRLRAILQNQGN

SEQ ID NO: 542 - protein, 199 aa, synthetic construct
MEASPASGPRHLMDPHIFYSNFNNGIGRHKTYLCYEVERLDNGTWVKMDQHRGFLHNQAKNLLCGFYGRHAELLFLDLVPSLQLDPAQIYRVTWFISWSPCFSWGCACEVRAFLQENTHVRLRIFAARIADHWPLYKEALQMLRDAGAQVSIMTYDEFKHCWDTFVDHQGAPFQPWDGLDEHSQALSQRLRAILQNQGN

SEQ ID NO: 543 - protein, 199 aa, synthetic construct
MEASPASGPRHLMDPHIFYSNFNNRIGRHKTYLCYEVERLDNGTSVKMDQHRGFLHNQAKNLLCGFYGRHAELLFLDLVPSLQLDPAQIYRVTWFISWSPCFSWGCACEVRAFLQENTHVRLRIFAARIADHWPLYKEALQMLRDAGAQVSIMTYDEFKHCWDTFVDHQGAPFQPWDGLDEHSQALSQRLRAILQNQGN

SEQ ID NO: 544 - protein, 199 aa, synthetic construct
MEASPASGPRHLMDPHIFYSNFNNRIGRHKTYLCYEVERLDNGTWVKMDQHRGFLHNQAKNLLCGFYGRHAELLFLDLVPSLQLDPAQIYRVTWFISWSPCFSWGCACEVRAFLQENTHVRLRIFAARIADHWPLYKEALQMLRDAGAQVSIMTYDEFKHCWDTFVDHQGAPFQPWDGLDEHSQALSQRLRAILQNQGN

SEQ ID NO: 545 - protein, 199 aa, synthetic construct
MEASPASGPRHLMDPHIFYSNFNNKIGRHKTYLCYEVERLDNGTSVKMDQHRGFLHNQAKNLLCGFYGRHAELLFLDLVPSLQLDPAQIYRVTWFISWSPCFSWGCACEVRAFLQENTHVRLRIFAARIADHWPLYKEALQMLRDAGAQVSIMTYDEFKHCWDTFVDHQGAPFQPWDGLDEHSQALSQRLRAILQNQGN

SEQ ID NO: 546 - protein, 199 aa, synthetic construct
MEASPASGPRHLMDPHIFYSNFNNKIGRHKTYLCYEVERLDNGTWVKMDQHRGFLHNQAKNLLCGFYGRHAELLFLDLVPSLQLDPAQIYRVTWFISWSPCFSWGCACEVRAFLQENTHVRLRIFAARIADHWPLYKEALQMLRDAGAQVSIMTYDEFKHCWDTFVDHQGAPFQPWDGLDEHSQALSQRLRAILQNQGN

SEQ ID NO: 547 - protein, 199 aa, synthetic construct
MEASPASGPRHLMDPHIFYSNFNNGIGRHKTYLCYEVERLDNGTSVKMDQHRGFLHNQAKNLLCGFYGRHAELLFLDLVPSLQLDPAQIYRVTWFISWSPCFSWGCACEVRAFLQENTHVRLRIFAARIADHWPLYKEALQMLRDAGAQVSIMTYDEFKHCWDTFVDHQGAPFQPWDGLDEHSQALSARLRAILQNQGN

SEQ ID NO: 548 - protein, 199 aa, synthetic construct
MEASPASGPRHLMDPHIFYSNFNNGIGRHKTYLCYEVERLDNGTWVKMDQHRGFLHNQAKNLLCGFYGRHAELLFLDLVPSLQLDPAQIYRVTWFISWSPCFSWGCACEVRAFLQENTHVRLRIFAARIADHWPLYKEALQMLRDAGAQVSIMTYDEFKHCWDTFVDHQGAPFQPWDGLDEHSQALSARLRAILQNQGN

SEQ ID NO: 549 - protein, 199 aa, synthetic construct
MEASPASGPRHLMDPHIFYSNFNNRIGRHKTYLCYEVERLDNGTSVKMDQHRGFLHNQAKNLLCGFYGRHAELLFLDLVPSLQLDPAQIYRVTWFISWSPCFSWGCACEVRAFLQENTHVRLRIFAARIADHWPLYKEALQMLRDAGAQVSIMTYDEFKHCWDTFVDHQGAPFQPWDGLDEHSQALSARLRAILQNQGN

SEQ ID NO: 550 - protein, 199 aa, synthetic construct
MEASPASGPRHLMDPHIFYSNFNNRIGRHKTYLCYEVERLDNGTWVKMDQHRGFLHNQAKNLLCGFYGRHAELLFLDLVPSLQLDPAQIYRVTWFISWSPCFSWGCACEVRAFLQENTHVRLRIFAARIADHWPLYKEALQMLRDAGAQVSIMTYDEFKHCWDTFVDHQGAPFQPWDGLDEHSQALSARLRAILQNQGN

SEQ ID NO: 551 - protein, 199 aa, synthetic construct
MEASPASGPRHLMDPHIFYSNFNNKIGRHKTYLCYEVERLDNGTSVKMDQHRGFLHNQAKNLLCGFYGRHAELLFLDLVPSLQLDPAQIYRVTWFISWSPCFSWGCACEVRAFLQENTHVRLRIFAARIADHWPLYKEALQMLRDAGAQVSIMTYDEFKHCWDTFVDHQGAPFQPWDGLDEHSQALSARLRAILQNQGN

SEQ ID NO: 552 - protein, 199 aa, synthetic construct
MEASPASGPRHLMDPHIFYSNFNNKIGRHKTYLCYEVERLDNGTWVKMDQHRGFLHNQAKNLLCGFYGRHAELLFLDLVPSLQLDPAQIYRVTWFISWSPCFSWGCACEVRAFLQENTHVRLRIFAARIADHWPLYKEALQMLRDAGAQVSIMTYDEFKHCWDTFVDHQGAPFQPWDGLDEHSQALSARLRAILQNQGN

SEQ ID NO: 553 - protein, 199 aa, synthetic construct
MEASPASGPRHLMDPHIFYSNFNNGIGRHKTYLCYEVERLDNGTSVKMDQHRGFLHNQAKNLLCGFYGRHAELLFLDLVPSLQLDPAQIYRVTWFISWSPCFSWGCACEVRAFLQENTHVRLRIFAARIADHWPLYKEALQMLRDAGAQVSIMTYDEFKHCWDTFVDHQGAPFQPWDGLDEHSQALSRRLRAILQNQGN

SEQ ID NO: 554 - protein, 199 aa, synthetic construct
MEASPASGPRHLMDPHIFYSNFNNGIGRHKTYLCYEVERLDNGTWVKMDQHRGFLHNQAKNLLCGFYGRHAELLFLDLVPSLQLDPAQIYRVTWFISWSPCFSWGCACEVRAFLQENTHVRLRIFAARIADHWPLYKEALQMLRDAGAQVSIMTYDEFKHCWDTFVDHQGAPFQPWDGLDEHSQALSRRLRAILQNQGN

SEQ ID NO: 555 - protein, 199 aa, synthetic construct
MEASPASGPRHLMDPHIFYSNFNNRIGRHKTYLCYEVERLDNGTSVKMDQHRGFLHNQAKNLLCGFYGRHAELLFLDLVPSLQLDPAQIYRVTWFISWSPCFSWGCACEVRAFLQENTHVRLRIFAARIADHWPLYKEALQMLRDAGAQVSIMTYDEFKHCWDTFVDHQGAPFQPWDGLDEHSQALSRRLRAILQNQGN

SEQ ID NO: 556 - protein, 199 aa, synthetic construct
MEASPASGPRHLMDPHIFYSNFNNRIGRHKTYLCYEVERLDNGTWVKMDQHRGFLHNQAKNLLCGFYGRHAELLFLDLVPSLQLDPAQIYRVTWFISWSPCFSWGCACEVRAFLQENTHVRLRIFAARIADHWPLYKEALQMLRDAGAQVSIMTYDEFKHCWDTFVDHQGAPFQPWDGLDEHSQALSRRLRAILQNQGN

SEQ ID NO: 557 - protein, 199 aa, synthetic construct
MEASPASGPRHLMDPHIFYSNFNNKIGRHKTYLCYEVERLDNGTSVKMDQHRGFLHNQAKNLLCGFYGRHAELLFLDLVPSLQLDPAQIYRVTWFISWSPCFSWGCACEVRAFLQENTHVRLRIFAARIADHWPLYKEALQMLRDAGAQVSIMTYDEFKHCWDTFVDHQGAPFQPWDGLDEHSQALSRRLRAILQNQGN

SEQ ID NO: 558 - protein, 199 aa, synthetic construct
MEASPASGPRHLMDPHIFYSNFNNKIGRHKTYLCYEVERLDNGTWVKMDQHRGFLHNQAKNLLCGFYGRHAELLFLDLVPSLQLDPAQIYRVTWFISWSPCFSWGCACEVRAFLQENTHVRLRIFAARIADHWPLYKEALQMLRDAGAQVSIMTYDEFKHCWDTFVDHQGAPFQPWDGLDEHSQALSRRLRAILQNQGN

SEQ ID NO: 559 - protein, 199 aa, synthetic construct
MEASPASGPRHLMDPHIFYSNFNNGIGRHKTYLVYEVERLDNGTSVKMDQHRGFLHNQAKNLLCGFYGRHAELLFLDLVPSLQLDPAQIYRVTWFISWSPCFSWGCAGEVRAFLQENTHVRLRIFAARIADHWPLYKEALQMLRDAGAQVSIMTYDEFKHVWDTFVDHQGAPFQPWDGLDEHSQALSGRLRAILQNQGN

SEQ ID NO: 560 - protein, 199 aa, synthetic construct
MEASPASGPRHLMDPHIFYSNFNNGIGRHKTYLVYEVERLDNGTSVKMDQHRGFLHNQAKNLLCGFYGRHAELLFLDLVPSLQLDPAQIYRVTWFISWSPCFSWGCAGEVRAFLQENTHVRLRIFAARIADHWPLYKEALQMLRDAGAQVSIMTYDEFKHLWDTFVDHQGAPFQPWDGLDEHSQALSGRLRAILQNQGN

SEQ ID NO: 561 - protein, 199 aa, synthetic construct
MEASPASGPRHLMDPHIFYSNFNNGIGRHKTYLLYEVERLDNGTSVKMDQHRGFLHNQAKNLLCGFYGRHAELLFLDLVPSLQLDPAQIYRVTWFISWSPCFSWGCAGEVRAFLQENTHVRLRIFAARIADHWPLYKEALQMLRDAGAQVSIMTYDEFKHVWDTFVDHQGAPFQPWDGLDEHSQALSGRLRAILQNQGN

SEQ ID NO: 562 - protein, 199 aa, synthetic construct
MEASPASGPRHLMDPHIFYSNFNNGIGRHKTYLLYEVERLDNGTSVKMDQHRGFLHNQAKNLLCGFYGRHAELLFLDLVPSLQLDPAQIYRVTWFISWSPCFSWGCAGEVRAFLQENTHVRLRIFAARIADHWPLYKEALQMLRDAGAQVSIMTYDEFKHLWDTFVDHQGAPFQPWDGLDEHSQALSGRLRAILQNQGN

SEQ ID NO: 563 - protein, 199 aa, synthetic construct
MEASPASGPRHLMDPHIFYSNFNNGIGRHKTYLCYEVERLDNGTWVKMDQHRGFLHNQAKNLLCGFYGRHAELLFLDLVPSLQLDPAQIYRVTWFISWSPCFSWGCAGEVRAFLQENTHVRLRIFCARIADHWPLYKEALQMLRDAGAQVSIMTYDEFKHCWDTFVDHQGAPFQPWDGLDEHSQALSGRLRAILQNQGN

SEQ ID NO: 564 - protein, 199 aa, synthetic construct
MEASPASGPRHLMDPHIFYSNFNNGIGVHKTYLCYEVERLDNGTWVKMDQHRGFLHNQAKNLLCGFYGRHAELLFLDLVPSLQLDPAQIYRVTWFISWSPCFSWGCAGEVRAFLQENTHVRLRIFAARIADHWPLYKEALQMLRDAGAQVSIMTYDEFKHCWDTFVDHQGAPFQPWDGLDEHSQALSGRLRAILQNQGN

SEQ ID NO: 565 - protein, 199 aa, synthetic construct
MEASPASGPRHWMDPHIFYSNFNNGIGRHKTYLCYEVERLDNGTWVKMDQHRGFLHNQAKNLLCGFYGRHAELLFLDLVPSLQLDPAQIYRVTWFISWSPCFSWGCAGEVRAFLQENTHVRLRIFAARIADHWPLYKEALQMLRDAGAQVSIMTYDEFKHCWDTFVDHQGAPFQPWDGLDEHSQALSGRLRAILQNQGN

SEQ ID NO: 566 - protein, 199 aa, synthetic construct
MEASPASGPRHWMDPHIFYSNFNNGIGVHKTYLCYEVERLDNGTWVKMDQHRGFLHNQAKNLLCGFYGRHAELLFLDLVPSLQLDPAQIYRVTWFISWSPCFSWGCAGEVRAFLQENTHVRLRIFCARIADHWPLYKEALQMLRDAGAQVSIMTYDEFKHCWDTFVDHQGAPFQPWDGLDEHSQALSGRLRAILQNQGN

SEQ ID NO: 567 - protein, 191 aa, synthetic construct
MEASPASGPRHLMDPHIFYSNFNNGIGRHKTYLCYEVERLDNGTSVKMDQHRGFLHNQPRRHAELLFLDLVPSLQLDPAQIYRVTWFISWSPCFSWGCAGEVRAFLQENTHVRLRIFAARIADHWPLYKEALQMLRDAGAQVSIMTYDEFKHCWDTFVDHQGAPFQPWDGLDEHSQALSGRLRAILQNQGN

SEQ ID NO: 568 - protein, 191 aa, synthetic construct
MEASPASGPRHLMDPHIFYSNFNNGIGRHKTYLCYEVERLDNGTSVKMDQHRGFLHNESGRHAELLFLDLVPSLQLDPAQIYRVTWFISWSPCFSWGCAGEVRAFLQENTHVRLRIFAARIADHWPLYKEALQMLRDAGAQVSIMTYDEFKHCWDTFVDHQGAPFQPWDGLDEHSQALSGRLRAILQNQGN

SEQ ID NO: 569 - protein, 199 aa, synthetic construct
MEASPASGPRHLMDPHTFYSNFNNKIGRHKTYLCYEVERLDNGTWVKMDQHRGFLHNQAKNLLCGFYGRHAELLFLDLVPSLQLDPAQIYRVTWFISWSPCFSWGCAAEVRAFLQENTHVRLRIFAARIADHWPLYKEALQMLRDAGAQVSIMTYDEFKHCWDTFVDHQGAPFQPWDGLDEHSQALSRRLRAILQNQGN

SEQ ID NO: 570 - protein, 199 aa, synthetic construct
MEASPASGPRHLMDPHTFYSNFNNRIGRHKTYLCYEVERLDNGTWVKMDQHRGFLHNQAKNLLCGFYGRHAELLFLDLVPSLQLDPAQIYRVTWFISWSPCFSWGCAAEVRAFLQENTHVRLRIFAARIADHWPLYKEALQMLRDAGAQVSIMTYDEFKHCWDTFVDHQGAPFQPWDGLDEHSQALSRRLRAILQNQGN

SEQ ID NO: 571 - protein, 199 aa, synthetic construct
MEASPASGPRHLMDPHTFYSNFNNKIGRHKTYLCYEVERLDNGTWVKMDQHRGFLHNQAKNLLCGFYGRHAELLFLDLVPSLQLDPAQIYRVTWFISWSPCFSWGCAAEVRAFLQENTHVRLRIFAARIADHWPLYKEALQMLRDAGAQVSIMTYDEFKHCWDTFVDHQGAPFQPWDGLDEHSQILSRRLRAILQNQGN

SEQ ID NO: 572 - protein, 199 aa, synthetic construct
MEASPASGPRHLMDPHTFYSNFNNRIGRHKTYLCYEVERLDNGTWVKMDQHRGFLHNQAKNLLCGFYGRHAELLFLDLVPSLQLDPAQIYRVTWFISWSPCFSWGCAAEVRAFLQENTHVRLRIFAARIADHWPLYKEALQMLRDAGAQVSIMTYDEFKHCWDTFVDHQGAPFQPWDGLDEHSQILSRRLRAILQNQGN

SEQ ID NO: 573 - protein, 199 aa, synthetic construct
MEASPASGPRHLMYPHTFYSNFNNKIGRHKTYLCYEVERLDNGTWVKMDQHRGFLHNQAKNLLCGFYGRHAELLFLDHVPSLQLDPAQHYRVTWFISWSPCFSWGCAAEVRAFLQENTHVRLRIFAARIADHWPLYKEALQMLRDAGAQVSIMTYDEFKHCWDTFVDHQGAPFQPWDGLDEHSQILSRRLRAILQNQGN

SEQ ID NO: 574 - protein, 199 aa, synthetic construct
MEASPASGPRHLMDPHTFYSNFNNKIGRHKTYLCYEVERLDNGTWVKMDQHRGFLHNQAKNPLCGFYGRHAELLFLDLVPSLQLDPAQRYRVTWFISWSPCFSWGCAAEVRAFLQENTHVRLRIFAARIADHWPLYKEALQMLRDAGAQVSIMTYDEFKHCWDTFVDHQGAPFQPWDGLDEHSQILSRRLRAILQNQGN

SEQ ID NO: 575 - protein, 191 aa, synthetic construct
MEASPASGPRHLMDPHTFYSNFNNKIGRHKTYLCYEVERLDNGTWVKMDQHRGFLHNQPRRHAELLFLDLVPSLQLDPAQIYRVTWFISWSPCFSWGCAAEVRAFLQENTHVRLRIFAARIADHWPLYKEALQMLRDAGAQVSIMTYDEFKHCWDTFVDHQGAPFQPWDGLDEHSQILSRRLRAILQNQGN

SEQ ID NO: 576 - protein, 191 aa, synthetic construct
MEASPASGPRHLMDPHTFYSNFNNRIGRHKTYLCYEVERLDNGTWVKMDQHRGFLHNQPRRHAELLFLDLVPSLQLDPAQIYRVTWFISWSPCFSWGCAAEVRAFLQENTHVRLRIFAARIADHWPLYKEALQMLRDAGAQVSIMTYDEFKHCWDTFVDHQGAPFQPWDGLDEHSQILSRRLRAILQNQGN

SEQ ID NO: 577 - protein, 199 aa, synthetic construct
MEASPASGPRHLMDPHTFYSNFNNKIGRHKTYLCYEVERLDNGTWVKMDQHRGFLHNQAKNLLCGFYGRHAELLFLDLVPSLQLDPAQIYRVTWFISWSPCFSWGCACEVRAFLQENTHVRLRIFAARIADHWPLYKEALQMLRDAGAQVSIMTYDEFKHCWDTFVDHQGAPFQPWDGLDEHSQALSRRLRAILQNQGN

SEQ ID NO: 578 - protein, 199 aa, synthetic construct
MEASPASGPRHWMDPHTFYSNFNNKIGVHKTYLCYEVERLDNGTWVKMDQHRGFLHNQAKNLLCGFYGRHAELLFLDLVPSLQLDPAQIYRVTWFISWSPCFSWGCAAEVRAFLQENTHVRLRIFCARIADHWPLYKEALQMLRDAGAQVSIMTYDEFKHCWDTFVDHQGAPFQPWDGLDEHSQALSRRLRAILQNQGN

SEQ ID NO: 579 - protein, 191 aa, synthetic construct
MEASPASGPRHLMDPHTFYSNFNNKIGRHKTYLCYEVERLDNGTWVKMDQHRGFLHNQPRRHAELLFLDLVPSLQLDPAQIYRVTWFISWSPCFSWGCAAEVRAFLQENTHVRLRIFCARIADHWPLYKEALQMLRDAGAQVSIMTYDEFKHCWDTFVDHQGAPFQPWDGLDEHSQALSRRLRAILQNQGN

SEQ ID NO: 580-581 - skipped (2 entries)

SEQ ID NO: 582 - protein, 191 aa, synthetic construct
MEASPASGPRHLMDPDTFYSNFNNKIGRHKTYLCYEVERLDNGTWVKMDQHRGFLHNQPRRHAELLFLDLVPSLQLDPAQIYRVTWFISWSPCFSWGCACEVRAFLQENTHVRLRIFAARIADHWPLYKEALQMLRDAGAQVSIMTYDEFKHCWDTFVDHQGAPFQPWDGLDEHSQALSRRLRAILQNQGN

SEQ ID NO: 583 - protein, 191 aa, synthetic construct
MEASPASGPRHLMDPHTFYFNFNNKIGRHKTYLCYEVERLDNGTWVKMDQHRGFLHNQPRRHAELLFLDLVPSLQLDPAQIYRVTWFISWSPCFSWGCACEVRAFLQENTHVRLRIFAARIADHWPLYKEALQMLRDAGAQVSIMTYDEFKHCWDTFVDHQGAPFQPWDGLDEHSQALSRRLRAILQNQGN

SEQ ID NO: 584 - protein, 191 aa, synthetic construct
MEASPASGPRHLMDPHTFYSNFNNKLGRHKTYLCYEVERLDNGTWVKMDQHRGFLHNQPRRHAELLFLDLVPSLQLDPAQIYRVTWFISWSPCFSWGCACEVRAFLQENTHVRLRIFAARIADHWPLYKEALQMLRDAGAQVSIMTYDEFKHCWDTFVDHQGAPFQPWDGLDEHSQALSRRLRAILQNQGN

SEQ ID NO: 585 - protein, 191 aa, synthetic construct
MEASPASGPRHLMDPHTFYSNFNNKIGRHKTYLCYEVERLDNGTWVKMDQHRGFLHNQPRRHAELLFLDLVPSLQLDPAQIYRVTWFISWSPCFSWGCACEVRAFLQENTHVRLRIFAARIADHWPLYKEALQMLRDAGAQVSIMTYDEFKHCWDTFVDHRGAPFQPWDGLDEHSQALSRRLRAILQNQGN

SEQ ID NO: 586 - protein, 191 aa, synthetic construct
MEASPASGPRHLMDPHTFYSNFNNKIGRHKTYLCYEVERLDNGTWVKMDQHRGFLHNQPRRHAELLFLDLVPSLQLDPAQIYRVTWFISWSPCFSWGCACEVRAFLQENTHVRLRIFAARIADHWPLYKEALQMLRDAGAQVSIMTYDEFKHCWDTFVDHQGAPFQPWEGLDEHSQALSRRLRAILQNQGN

SEQ ID NO: 587 - protein, 191 aa, synthetic construct
MEASPASGPRHLMDPHTFYSNFNNKIGRHKTYLCYEVERLDNGTWVKMDQHRGFLHNQPRRHAELLFLDLVPSLQLDPAQIYRVTWFISWSPCFSWGCACEVRAFLQENTHVRLRIFAARIADHWPLYKEALQMLRDAGAQVSIMTYDEFKHCWDTFVDHQGAPFQPWDGLHEHSQALSRRLRAILQNQGN

SEQ ID NO: 588 - protein, 191 aa, synthetic construct
MEASPASGPRHLMDPHTFYSNFNNKIGRHKTYLCYEVERLDNGTWVKMDQHRGFLHNQPRRHAELLFLDLVPSLQLDPAQIYRVTWFISWSPCFSWGCACEVRAFLQENTHVRLRIFAARIADHWPLYKEALQMLRDAGAQVSIMTYDEFKHCWDTFVDHQGAPFQPWDGLDENSQALSRRLRAILQNQGN

SEQ ID NO: 589 - protein, 191 aa, synthetic construct
MEASPASGPRHLMDPHTFYSNFNNKIGRHKTYLCYEVERLDNGTWVKMDQHRGFLHNQPRRHAELLFLDLVPSLQLDPAQIYRVTWFISWSPCFSWGCACEVRAFLQENTHVRLRIFAARIADHWPLYKEALQMLRDAGAQVSIMTYDEFKHCWDTFVDHQGAPFQPWDGLDEHSVALSRRLRAILQNQGN

SEQ ID NO: 590 - protein, 191 aa, synthetic construct
MEASPASGPRHLMDPHTFYSNFNNKIGRHKTYLCYEVERLDNGTWVKMDQHRGFLHNQPRRHAELLFLDLVPSLQLDPAQIYRVTWFISWSPCFSWGCACEVRAFLQENTHVRLRIFAARIADHWPLYKEALQMLRDAGAQVSIMTYDEFKHCWDTFVDHQGAPFQPWDGLDEHSQRLSRRLRAILQNQGN

SEQ ID NO: 591 - protein, 191 aa, synthetic construct
MEASPASGPRHLMDPHTFYSNFNNKIGRHKTYLCYEVERLDNGTWVKMDQHRGFLHNQPRRHAELLFLDLVPSLQLDPAQIYRVTWFISWSPCFSWGCACEVRAFLQENTHVRLRIFAARIADHWPLYKEALQMLRDAGAQVSIMTYDEFKHCWDTFVDHQGAPFQPWDGLDEHSQALSRKLRAILQNQGN

SEQ ID NO: 592 - protein, 191 aa, synthetic construct
MEASPASGPRHLMDPHTFYSNFNNKIGRHKTYLCYEVERLDNGTWVKMDQHRGFLHNQPRRHAELLFLDLVPSLQLDPAQIYRVTWFISWSPCFSWGCACEVRAFLQENTHVRLRIFAARIADHWPLYKEALQMLRDAGAQVSIMTYDEFKHCWDTFVDHQGAPFQPWDGLDEHSQALSRRLRRILQNQGN

SEQ ID NO: 593 - protein, 191 aa, synthetic construct
MEASPASGPRHLMDPHTFYWNFNNKIGRHKTYLCYEVERLDNGTWVKMDQHRGFLHNQPRRHAELLFLDLVPSLQLDPAQIYRVTWFISWSPCFSWGCACEVRAFLQENTHVRLRIFAARIADHWPLYKEALQMLRDAGAQVSIMTYDEFKHCWDTFVDHQGAPFQPWDGLDEHSQALSRRLRAILQNQGN

SEQ ID NO: 594 - protein, 191 aa, synthetic construct
MEASPASGPRHLMDPHTFYSNFNNKIFRHKTYLCYEVERLDNGTWVKMDQHRGFLHNQPRRHAELLFLDLVPSLQLDPAQIYRVTWFISWSPCFSWGCACEVRAFLQENTHVRLRIFAARIADHWPLYKEALQMLRDAGAQVSIMTYDEFKHCWDTFVDHQGAPFQPWDGLDEHSQALSRRLRAILQNQGN

SEQ ID NO: 595 - protein, 191 aa, synthetic construct
MEASPASGPRHLMDPHTFYSNFNNKICRHKTYLCYEVERLDNGTWVKMDQHRGFLHNQPRRHAELLFLDLVPSLQLDPAQIYRVTWFISWSPCFSWGCACEVRAFLQENTHVRLRIFAARIADHWPLYKEALQMLRDAGAQVSIMTYDEFKHCWDTFVDHQGAPFQPWDGLDEHSQALSRRLRAILQNQGN

SEQ ID NO: 596 - protein, 191 aa, synthetic construct
MEASPASGPRHLMDPHTFYSNFNNKIYRHKTYLCYEVERLDNGTWVKMDQHRGFLHNQPRRHAELLFLDLVPSLQLDPAQIYRVTWFISWSPCFSWGCACEVRAFLQENTHVRLRIFAARIADHWPLYKEALQMLRDAGAQVSIMTYDEFKHCWDTFVDHQGAPFQPWDGLDEHSQALSRRLRAILQNQGN

SEQ ID NO: 597 - protein, 191 aa, synthetic construct
MEASPASGPRHLMDPHTFYSNFNNKIGRHKIYLCYEVERLDNGTWVKMDQHRGFLHNQPRRHAELLFLDLVPSLQLDPAQIYRVTWFISWSPCFSWGCACEVRAFLQENTHVRLRIFAARIADHWPLYKEALQMLRDAGAQVSIMTYDEFKHCWDTFVDHQGAPFQPWDGLDEHSQALSRRLRAILQNQGN

SEQ ID NO: 598 - protein, 191 aa, synthetic construct
MEASPASGPRHLMDPHTFYSNFNNKIGRHKTYLRYEVERLDNGTWVKMDQHRGFLHNQPRRHAELLFLDLVPSLQLDPAQIYRVTWFISWSPCFSWGCACEVRAFLQENTHVRLRIFAARIADHWPLYKEALQMLRDAGAQVSIMTYDEFKHCWDTFVDHQGAPFQPWDGLDEHSQALSRRLRAILQNQGN

SEQ ID NO: 599 - protein, 191 aa, synthetic construct
MEASPASGPRHLMDPHTFYSNFNNKIGRHKTYLCYEVWRLDNGTWVKMDQHRGFLHNQPRRHAELLFLDLVPSLQLDPAQIYRVTWFISWSPCFSWGCACEVRAFLQENTHVRLRIFAARIADHWPLYKEALQMLRDAGAQVSIMTYDEFKHCWDTFVDHQGAPFQPWDGLDEHSQALSRRLRAILQNQGN

SEQ ID NO: 600 - protein, 191 aa, synthetic construct
MEASPASGPRHLMDPHTFYSNFNNKIGRHKTYLCYEVERLDNGTWVKMDQHRGFLHNQPRRHAELLFLDLVWSLQLDPAQIYRVTWFISWSPCFSWGCACEVRAFLQENTHVRLRIFAARIADHWPLYKEALQMLRDAGAQVSIMTYDEFKHCWDTFVDHQGAPFQPWDGLDEHSQALSRRLRAILQNQGN

SEQ ID NO: 601 - protein, 191 aa, synthetic construct
MEASPASGPRHLMDPHTFYSNFNNKIGRHKTYLCYEVERLDNGTWVKMDQHRGFLHNQPRRHAELLFLDLVPSLQLIPAQIYRVTWFISWSPCFSWGCACEVRAFLQENTHVRLRIFAARIADHWPLYKEALQMLRDAGAQVSIMTYDEFKHCWDTFVDHQGAPFQPWDGLDEHSQALSRRLRAILQNQGN

SEQ ID NO: 602 - protein, 191 aa, synthetic construct
MEASPASGPRHLMDPHTFYSNFNNKIGRHKTYLCYEVERLDNGTWVKMDQHRGFLHNQPRRHAELLFLDLVPSLQLDPAQIYRVTWFILWSPCFSWGCACEVRAFLQENTHVRLRIFAARIADHWPLYKEALQMLRDAGAQVSIMTYDEFKHCWDTFVDHQGAPFQPWDGLDEHSQALSRRLRAILQNQGN

SEQ ID NO: 603 - protein, 191 aa, synthetic construct
MEASPASGPRHLMDPHTFYSNFNNKIGRHKTYLCYEVERLDNGTWVKMDQHRGFLHNQPRRHAELLFLDLVPSLQLDPAQIYRVTWFISWSPWFSWGCACEVRAFLQENTHVRLRIFAARIADHWPLYKEALQMLRDAGAQVSIMTYDEFKHCWDTFVDHQGAPFQPWDGLDEHSQALSRRLRAILQNQGN

SEQ ID NO: 604 - protein, 191 aa, synthetic construct
MEASPASGPRHLMDPHTFYSNFNNKIGRHKTYLCYEVERLDNGTWVKMDQHRGFLHNQPRRHAELLFLDLVPSLQLDPAQIYRVTWFISWSPCFWWGCACEVRAFLQENTHVRLRIFAARIADHWPLYKEALQMLRDAGAQVSIMTYDEFKHCWDTFVDHQGAPFQPWDGLDEHSQALSRRLRAILQNQGN

SEQ ID NO: 605 - protein, 191 aa, synthetic construct
MEASPASGPRHLMDPHTFYSNFNNKIGRHKTYLCYEVERLDNGTWVKMDQHRGFLHNQPRRHAELLFLDLVPSLQLDPAQIYRVTWFISWSPCFFWGCACEVRAFLQENTHVRLRIFAARIADHWPLYKEALQMLRDAGAQVSIMTYDEFKHCWDTFVDHQGAPFQPWDGLDEHSQALSRRLRAILQNQGN

SEQ ID NO: 606 - protein, 191 aa, synthetic construct
MEASPASGPRHLMDPHTFYSNFNNKIGRHKTYLCYEVERLDNGTWVKMDQHRGFLHNQPRRHAELLFLDLVPSLQLDPAQIYRVTWFISWSPCFSWGCACWVRAFLQENTHVRLRIFAARIADHWPLYKEALQMLRDAGAQVSIMTYDEFKHCWDTFVDHQGAPFQPWDGLDEHSQALSRRLRAILQNQGN

SEQ ID NO: 607 - protein, 191 aa, synthetic construct
MEASPASGPRHLMDPHTFYSNFNNKIGRHKTYLCYEVERLDNGTWVKMDQHRGFLHNQPRRHAELLFLDLVPSLQLDPAQIYRVTWFISWSPCFSWGCACELRAFLQENTHVRLRIFAARIADHWPLYKEALQMLRDAGAQVSIMTYDEFKHCWDTFVDHQGAPFQPWDGLDEHSQALSRRLRAILQNQGN

SEQ ID NO: 608 - protein, 191 aa, synthetic construct
MEASPASGPRHLMDPHTFYSNFNNKIGRHKTYLCYEVERLDNGTWVKMDQHRGFLHNQPRRHAELLFLDLVPSLQLDPAQIYRVTWFISWSPCFSWGCACEVRAFLQENTHVRLRIFAAYIADHWPLYKEALQMLRDAGAQVSIMTYDEFKHCWDTFVDHQGAPFQPWDGLDEHSQALSRRLRAILQNQGN

SEQ ID NO: 609 - protein, 191 aa, synthetic construct
MEASPASGPRHLMDPHTFYSNFNNKIGRHKTYLCYEVERLDNGTWVKMDQHRGFLHNQPRRHAELLFLDLVPSLQLDPAQIYRVTWFISWSPCFSWGCACEVRAFLQENTHVRLRIFAARIADHWPLYKEWLQMLRDAGAQVSIMTYDEFKHCWDTFVDHQGAPFQPWDGLDEHSQALSRRLRAILQNQGN

SEQ ID NO: 610 - protein, 191 aa, synthetic construct
MEASPASGPRHLMDPHTFYSNFNNKIGRHKTYLCYEVERLDNGTWVKMDQHRGFLHNQPRRHAELLFLDLVPSLQLDPAQIYRVTWFISWSPCFSWGCACEVRAFLQENTHVRLRIFAARIADHWPLYKEALQMLRDAGLQVSIMTYDEFKHCWDTFVDHQGAPFQPWDGLDEHSQALSRRLRAILQNQGN

SEQ ID NO: 611 - protein, 191 aa, synthetic construct
MEASPASGPRHLMDPHTFYSNFNNKIGRHKTYLCYEVERLDNGTWVKMDQHRGFLHNQPRRHAELLFLDLVPSLQLDPAQIYRVTWFISWSPCFSWGCACEVRAFLQENTHVRLRIFAARIADHWPLYKEALQMLRDAGAQVSIMTYWEFKHCWDTFVDHQGAPFQPWDGLDEHSQALSRRLRAILQNQGN

SEQ ID NO: 612 - protein, 191 aa, synthetic construct
MEASPASGPRHLMDPHTFYSNFNNKIGRHKTYLCYEVERLDNGTWVKMDQHRGFLHNQPRRHAELLFLDLVPSLQLDPAQIYRVTWFISWSPCFSWGCACEVRAFLQENTHVRLRIFAARIADHWPLYKEALQMLRDAGAQVSIMTYDEFKHCWWTFVDHQGAPFQPWDGLDEHSQALSRRLRAILQNQGN

SEQ ID NO: 613 - protein, 191 aa, synthetic construct
MEASPASGPRHLMDPHTFYSNFNNKIGRHKTYLCYEVERLDNGTWVKMDQHRGFLHNQPRRHAELLFLDLVPSLQLDPAQIYRVTWFISWSPCFSWGCACEVRAFLQENTHVRLRIFAARIADHWPLYKEALQMLRDAGAQVSIMTYDEFKHCWDTFVDHQGAPFQPWDGLDEHWQALSRRLRAILQNQGN

SEQ ID NO: 614 - protein, 191 aa, synthetic construct
MEASPASGPRHLMDPHTFYSNFNNKIGRHKTYLCYEVERLDNGTWVKMDQHRGFLHNQPRRHAELLFLDLVPSLQLDPAQIYRVTWFISWSPCFSWGCACEVRAFLQENTHVRLRIFAARIADHWPLYKEALQMLRDAGAQVSIMTYDEFKHCWDTFVDHQGAPFQPWDGLDEHVQALSRRLRAILQNQGN

SEQ ID NO: 615 - protein, 191 aa, synthetic construct
MEASPASGPRHLMDPHTFYSNFNNKIGRHKTYLCYEVERLDNGTWVKMDQHRGFLHNQPRRHAELLFLDLVPSLQLDPAQIYRVTWFISWSPCFSWGCACEVRAFLQENTHVRLRIFAARIADHWPLYKEALQMLRDAGAQVSIMTYDEFKHCWDTFVDHQGAPFQPWDGLDEHYQALSRRLRAILQNQGN

SEQ ID NO: 616 - protein, 191 aa, synthetic construct
MEASPASGPRHLMDPHTFYSNFNNKIGRHKTYLCYEVERLDNGTWVKMDQHRGFLHNQPRRHAELLFLDLVPSLQLDPAQIYRVTWFISWSPCFSWGCACEVRAFLQENTHVRLRIFAARIADHWPLYKEALQMLRDAGAQVSIMTYDEFKHCWDTFVDHQGAPFQPWDGLDEHFQALSRRLRAILQNQGN

SEQ ID NO: 617 - protein, 191 aa, synthetic construct
MEASPASGPRHLMDPHTFYSNFNNKIGRHKTYLCYEVERLDNGTWVKMDQHRGFLHNQPRRHAELLFLDLVPSLQLDPAQIYRVTWFISWSPCFSWGCACEVRAFLQENTHVRLRIFAARIADHWPLYKEALQMLRDAGAQVSIMTYDEFKHCWDTFVDHQGAPFQPWDGLDEHSQALFRRLRAILQNQGN

SEQ ID NO: 618 - protein, 191 aa, synthetic construct
MEASPASGPRHLMDPHTFYSNFNNKIGRHKTYLCYEVERLDNGTWVKMDQHRGFLHNQPRRHAELLFLDLVPSLQLDPAQIYRVTWFISWSPCFSWGCACEVRAFLQENTHVRLRIFAARIADHWPLYKEALQMLRDAGAQVSIMTYDEFKHCWDTFVDHQGAPFQPWDGLDEHSQALYRRLRAILQNQGN

SEQ ID NO: 619 - protein, 191 aa, synthetic construct
MEASPASGPRHLMDPHTFYSNFNNKIGRHKTYLCYEVERLDNGTWVKMDQHRGFLHNQPRRHAELLFLDLVPSLQLDPAQIYRVTWFISWSPCFSWGCACEVRAFLQENTHVRLRIFAARIADHWPLYKEALQMLRDAGAQVSIMTYDEFKHCWDTFVDHQGAPFQPWDGLDEHSQALQRRLRAILQNQGN

SEQ ID NO: 620 - protein, 191 aa, synthetic construct
MEASPASGPRHLMDPHTFYSNFNNKIGRHKTYLCYEVERLDNGTWVKMDQHRGFLHNQPRRHAELLFLDLVPSLQLDPAQIYRVTWFISWSPCFSWGCACEVRAFLQENTHVRLRIFAARIADHWPLYKEALQMLRDAGAQVSIMTYDEFKHCWDTFVDHQGAPFQPWDGLDEHSQALSRRLRWILQNQGN

SEQ ID NO: 621 - protein, 191 aa, synthetic construct
MEASPASGPRHLMDPHTFYSNFNNKIGRHKTYLCYEVERLDNGTWVKMDQHRGFLHNQPRRHAELLFLDLVPSLQLDPAQIYRVTWFISWSPCFSWGCACEVRAFLQENTHVRLRIFAARIADHWPLYKEALQMLRDAGAQVSIMTYDEFKHCWDTFVDHQGAPFQPWDGLDEHSQALSRRLRIILQNQGN

SEQ ID NO: 622 - protein, 191 aa, synthetic construct
MEASPASGPRHLMDPHTFYSNFNNKIGRHKTYLCYEVERLDNGTWVKMDQHRGFLHNQPRRHAELLFLDLVPSLQLDPAQIYRVTWFISWSPCFSWGCACEVRAFLQENTHVRLRIFAARIADHWPLYKEALQMLRDAGAQVSIMTYDEFKHCWDTFVDHQGAPFQPWDGLDEHSQALSRRLRLILQNQGN

SEQ ID NO: 623 - protein, 191 aa, synthetic construct
MEASPASGPRHLMDPHTFYYNFNNKIGRHKTYLCYEVERLDNGTWVKMDQHRGFLHNQPRRHAELLFLDLVPSLQLDPAQIYRVTWFISWSPCFSWGCACEVRAFLQENTHVRLRIFAARIADHWPLYKEALQMLRDAGAQVSIMTYDEFKHCWDTFVDHQGAPFQPWDGLDEHSQALSRRLRAILQNQGN

SEQ ID NO: 624 - protein, 191 aa, synthetic construct
MEASPASGPRHLMDPHTFYENFNNKIGRHKTYLCYEVERLDNGTWVKMDQHRGFLHNQPRRHAELLFLDLVPSLQLDPAQIYRVTWFISWSPCFSWGCACEVRAFLQENTHVRLRIFAARIADHWPLYKEALQMLRDAGAQVSIMTYDEFKHCWDTFVDHQGAPFQPWDGLDEHSQALSRRLRAILQNQGN

SEQ ID NO: 625 - protein, 191 aa, synthetic construct
MEASPASGPRHLMDPHTFYSNFNNKAGRHKTYLCYEVERLDNGTWVKMDQHRGFLHNQPRRHAELLFLDLVPSLQLDPAQIYRVTWFISWSPCFSWGCACEVRAFLQENTHVRLRIFAARIADHWPLYKEALQMLRDAGAQVSIMTYDEFKHCWDTFVDHQGAPFQPWDGLDEHSQALSRRLRAILQNQGN

SEQ ID NO: 626 - protein, 191 aa, synthetic construct
MEASPASGPRHLMDPHTFYSNFNNKIGRHKTYLCYEVYRLDNGTWVKMDQHRGFLHNQPRRHAELLFLDLVPSLQLDPAQIYRVTWFISWSPCFSWGCACEVRAFLQENTHVRLRIFAARIADHWPLYKEALQMLRDAGAQVSIMTYDEFKHCWDTFVDHQGAPFQPWDGLDEHSQALSRRLRAILQNQGN

SEQ ID NO: 627 - protein, 191 aa, synthetic construct
MEASPASGPRHLMDPHTFYSNFNNKIGRHKTYLCYEVERLDNGTWVKMDQHRGFLHNQPRRHAELLFLDLVPSLQLDPAQIYRVTWFISWSPCFSWGCACEVRAFLQENTHVRLRIFAARIADHWPLYKEALQMLRDAGAQVSIMTYDEFKHCWDTFVDHQGAPFQPWDGLDEHSQALSRRLRKILQNQGN

SEQ ID NO: 628 - protein, 191 aa, synthetic construct
MEASPASGPRHLMDPHTFYSNFNNKIGRHKTYLCYEVERLDNGTWVKMDQHRGFLHNQPRRHAELLFLDLVPSLQLDPAQIYRVTWFISWSPCFSWGCACEVRAFLQENTHVRLRIFAARIADHWPLYKEALQMLRDAGAQVSIMTYDEFKHCWDTFVDHQGAPFQPWDGLDEHSQALSRRLREILQNQGN

SEQ ID NO: 629 - protein, 191 aa, synthetic construct
MEASPASGPRHLMDPHTFYSNFNNKIGRHKTYLCYEVERLDNGTWVKMDQHRGFLHNQPRRHAELLFLDLVPSLQLLPAQIYRVTWFISWSPCFSWGCACEVRAFLQENTHVRLRIFAARIADHWPLYKEALQMLRDAGAQVSIMTYDEFKHCWDTFVDHQGAPFQPWDGLDEHSQALSRRLRAILQNQGN

SEQ ID NO: 630 - protein, 191 aa, synthetic construct
MEASPASGPRHLMDPHTFYSNFNNKIGRHKTYLCYEVERLDNGTWVKMDQHRGFLHNQPRRHAELLFLDLVPSLQLDPAQIYRVTWFIYWSPCFSWGCACEVRAFLQENTHVRLRIFAARIADHWPLYKEALQMLRDAGAQVSIMTYDEFKHCWDTFVDHQGAPFQPWDGLDEHSQALSRRLRAILQNQGN

SEQ ID NO: 631 - protein, 191 aa, synthetic construct
MEASPASGPRHLMDPHTFYSNFNNKIGRHKTYLCYEVERLDNGTWVKMDQHRGFLHNQPRRHAELLFLDLVPSLQLDPAQIYRVTWFISWSPCFSWGCACLVRAFLQENTHVRLRIFAARIADHWPLYKEALQMLRDAGAQVSIMTYDEFKHCWDTFVDHQGAPFQPWDGLDEHSQALSRRLRAILQNQGN

SEQ ID NO: 632 - protein, 191 aa, synthetic construct
MEASPASGPRHLMDPHTFYSNFNNKIGRHKTYLCYEVERLDNGTWVKMDQHRGFLHNQPRRHAELLFLDLVPSLQLDPAQIYRVTWFISWSPCFSWGCACEWRAFLQENTHVRLRIFAARIADHWPLYKEALQMLRDAGAQVSIMTYDEFKHCWDTFVDHQGAPFQPWDGLDEHSQALSRRLRAILQNQGN

SEQ ID NO: 633 - protein, 191 aa, synthetic construct
MEASPASGPRHLMDPHTFYSNFNNKIGRHKTYLCYEVERLDNGTWVKMDQHRGFLHNQPRRHAELLFLDLVPSLQLDPAQIYRVTWFISWSPCFSWGCACEVRAFLQENTHVRLRIFAARIADHWPLYKEGLQMLRDAGAQVSIMTYDEFKHCWDTFVDHQGAPFQPWDGLDEHSQALSRRLRAILQNQGN

SEQ ID NO: 634 - protein, 191 aa, synthetic construct
MEASPASGPRHLMDPHTFYSNFNNKIGRHKTYLCYEVERLDNGTWVKMDQHRGFLHNQPRRHAELLFLDLVPSLQLDPAQIYRVTWFISWSPCFSWGCACEVRAFLQENTHVRLRIFAARIADHWPLYKEALQTLRDAGAQVSIMTYDEFKHCWDTFVDHQGAPFQPWDGLDEHSQALSRRLRAILQNQGN

SEQ ID NO: 635 - protein, 191 aa, synthetic construct
MEASPASGPRHLMDPHTFYSNFNNKIGRHKTYLCYEVERLDNGTWVKMDQHRGFLHNQPRRHAELLFLDLVPSLQLDPAQIYRVTWFISWSPCFSWGCACEVAAFLQENTHVRLRIFAARIADHWPLYKEALQMLRDAGAQVSIMTYDEFKHCWDTFVDHQGAPFQPWDGLDEHSQALSRRLRAILQNQGN

SEQ ID NO: 636 - protein, 191 aa, synthetic construct
MEASPASGPRHLMDPHTFYSNFNNKIGRHKTYLCYEVERLDNGTWVKMDQHRGFLHNQPRRHAELLFLDLVPSLQLDPAQIYRVTWFISWSPCFSWGCACEVRAFLQENTHVRLRIFAARIADHWPLYKEALQALRDAGAQVSIMTYDEFKHCWDTFVDHQGAPFQPWDGLDEHSQALSRRLRAILQNQGN

SEQ ID NO: 637 - protein, 191 aa, synthetic construct
MEASPASGPRHLMDPHTFYSNFNNKIGRHKTYLCYEVERLDGGTWVKMDQHRGFLHNQPRRHAELLFLDLVPSLQLDPAQIYRVTWFISWSPCFSWGCACEVRAFLQENTHVRLRIFAARIADHWPLYKEALQMLRDAGAQVSIMTYDEFKHCWDTFVDHQGAPFQPWDGLDEHSQALSRRLRAILQNQGN

SEQ ID NO: 638 - protein, 191 aa, synthetic construct
MEASPASGPRHLMDPHTFYSNFNNKIGRHKTYLCYEVERLDNGTWVKMDQHRGFLHNQPRRHAELLFLDLVPSLQLDPAQIYRVTWFISWSPCFSWGCACEVRAFLQENTHVRLRIFAARIADHWPLYKEALQMLRDAGAQVSIMTYDEFRHCWDTFVDHQGAPFQPWDGLDEHSQALSRRLRAILQNQGN

SEQ ID NO: 639 - protein, 191 aa, synthetic construct
MEASPASGPRHLMDPHTFYSNFNNKIGRHKTYLCYEVERLDNGTWVKMDQHRGFLHNQPRRHAELLFLDLVPSLQLDPAQIYRVTWFISWSPCFSWGCACEVVAFLQENTHVRLRIFAARIADHWPLYKEALQMLRDAGAQVSIMTYDEFKHCWDTFVDHQGAPFQPWDGLDEHSQALSRRLRAILQNQGN

SEQ ID NO: 640 - protein, 191 aa, synthetic construct
MEASPASGPRHLMDPHTFYSNFNNKIGRHKTYLCYEVERLDNGTWVKMDQHRGFLHNQPGRHAELLFLDLVPSLQLDPAQIYRVTWFISWSPCFSWGCACEVRAFLQENTHVRLRIFAARIADHWPLYKEALQMLRDAGAQVSIMTYDEFKHCWDTFVDHQGAPFQPWDGLDEHSQALSRRLRAILQNQGN

SEQ ID NO: 641 - protein, 191 aa, synthetic construct
MEASPASGPRHLMDPHTFYSNFNNKIGRHKTYLCYEVERLDNGTWVKMDQHRGFLHNQPRRHAELLFLDLVPSLQLDPAQIYRVTWFISWSPCFSWGCACEVRAFLQENTHVRLRIFAARIADHWPLYKEALQRLRDAGAQVSIMTYDEFKHCWDTFVDHQGAPFQPWDGLDEHSQALSRRLRAILQNQGN

SEQ ID NO: 642 - protein, 191 aa, synthetic construct
MEASPASGPRHLMDPHTFYSNFNNKIGRHKTYLCYEVERLDNGTWVKMDQHRGFLHNQPRRHAELLFLDLVPSLQLDPAQIYRVTWFISWSPCFSWGCACEVRAFLQENTHVRLRIFAARIADHWPLYKEALQMLRDAGAQVSIMTYPEFKHCWDTFVDHQGAPFQPWDGLDEHSQALSRRLRAILQNQGN

SEQ ID NO: 643 - protein, 191 aa, synthetic construct
MEASPASGPRHLMDPHTFYSNFNNKIGRHKTYLCYEVERLDDGTWVKMDQHRGFLHNQPRRHAELLFLDLVPSLQLDPAQIYRVTWFISWSPCFSWGCACEVRAFLQENTHVRLRIFAARIADHWPLYKEALQMLRDAGAQVSIMTYDEFKHCWDTFVDHQGAPFQPWDGLDEHSQALSRRLRAILQNQGN

SEQ ID NO: 644 - protein, 191 aa, synthetic construct
MEASPASGPRHLMDPHTFYSNFNNKIGRHKTYLLYEVERLDNGTWVKMDQHRGFLHNQPRRHAELLFLDLVPSLQLDPAQIYRVTWFISWSPCFSWGCACEVRAFLQENTHVRLRIFAARIADHWPLYKEALQMLRDAGAQVSIMTYDEFKHCWDTFVDHQGAPFQPWDGLDEHSQALSRRLRAILQNQGN

SEQ ID NO: 645 - protein, 191 aa, synthetic construct
MEASPASGPRHLMDPHTFYSNFNNKIGRHKTYLCYEVERLDNGTWVKMDQHRGFLHNQPRRHAELLFLDLVPSLQLDPAQIYRVTWFISWSPCFSWGCACEVRAFLQENTHVRLRIFAARIADHWPLYKEALQMLRDAGAQVSIMTYDEFKHCWDTFVDHQGAPFQPWDGLWEHSQALSRRLRAILQNQGN

SEQ ID NO: 646 - protein, 191 aa, synthetic construct
MEASPASGPRHLMDPHTFYHNFNNKIGRHKTYLCYEVERLDNGTWVKMDQHRGFLHNQPRRHAELLFLDLVPSLQLDPAQIYRVTWFISWSPCFSWGCACEVRAFLQENTHVRLRIFAARIADHWPLYKEALQMLRDAGAQVSIMTYDEFKHCWDTFVDHQGAPFQPWDGLDEHSQALSRRLRAILQNQGN

SEQ ID NO: 647 - protein, 191 aa, synthetic construct
MEASPASGPRHLMDPHTFYINFNNKIGRHKTYLCYEVERLDNGTWVKMDQHRGFLHNQPRRHAELLFLDLVPSLQLDPAQIYRVTWFISWSPCFSWGCACEVRAFLQENTHVRLRIFAARIADHWPLYKEALQMLRDAGAQVSIMTYDEFKHCWDTFVDHQGAPFQPWDGLDEHSQALSRRLRAILQNQGN

SEQ ID NO: 648 - protein, 179 aa, synthetic construct
MDPHTFYSNFNNKIGRHKTYLCYEVERLDNGTWVKMDQHRGFLHNQPRRHAELLFLDLVPSLQLDPAQIYRVTWFISWSPCFSWGCACEVRAFLQENTHVRLRIFAARIADHWPLYKEALQMLRDAGAQVSIMTYDEFKHCWDTFVDHQGAPFQPWDGLDEHSQALSRRLRAILQNQGN

SEQ ID NO: 649 - protein, 189 aa, synthetic construct; identical to SEQ ID NO: 77

SEQ ID NO: 650 - protein, 189 aa, synthetic construct
MEASPASGPRHLMDPHTFYSNFNNKIGRHKTYLCYEVERLDNGTWVKMDQHRGFLHNQPRRHAELLFLDLVPSLQLDPAQIYRVTWFISWSPCRNCACEVRAFLQENTHVRLRIFAARIADHWPLYKEALQMLRDAGAQVSIMTYDEFKHCWDTFVDHQGAPFQPWDGLDEHSQALSRRLRAILQNQGN

SEQ ID NO: 651 - protein, 177 aa, synthetic construct
MDPHTFYSNFNNKIGRHKTYLCYEVERLDNGTWVKMDQHRGFLHNQPRRHAELLFLDLVPSLQLDPAQIYRVTWFISWSPCFSCACEVRAFLQENTHVRLRIFAARIADHWPLYKEALQMLRDAGAQVSIMTYDEFKHCWDTFVDHQGAPFQPWDGLDEHSQALSRRLRAILQNQGN

SEQ ID NO: 652 - protein, 177 aa, synthetic construct
MDPHTFYSNFNNKIGRHKTYLCYEVERLDNGTWVKMDQHRGFLHNQPRRHAELLFLDLVPSLQLDPAQIYRVTWFISWSPCRNCACEVRAFLQENTHVRLRIFAARIADHWPLYKEALQMLRDAGAQVSIMTYDEFKHCWDTFVDHQGAPFQPWDGLDEHSQALSRRLRAILQNQGN

SEQ ID NO: 653 - protein, 188 aa, synthetic construct
MEASPASGPRHLMDPHTFYSNFNNKIGRHKTYLCYEVERLDNGTWVKMDQHRGFLHNQPRRHAELLFLDLVPSLQLDPAQIYRVTWFISWSPCFSWGCACEVRAFLQENTHVRLRIFAARIADHWPEALQMLRDAGAQVSIMTYDEFKHCWDTFVDHQGAPFQPWDGLDEHSQALSRRLRAILQNQGN

SEQ ID NO: 654 - protein, 190 aa, synthetic construct
MEASPASGPRHLMDPHTFYSNFNNKIGRHKTYLCYEVERLDNGTWVKMDQHRGFLHNQPRRHAELLFLDLVPSLQLDPAQIYRVTWFISWSPCFSWGCACEVRAFLQENTHVRLRIFAARIADHWPLYKEALQMLRDAGAQVSIMTYDEFKHCWDTFVDHQGAFQPWDGLDEHSQALSRRLRAILQNQGN

SEQ ID NO: 655 - protein, 190 aa, synthetic construct
MEASPASGPRHLMDPHTFYSNFNNKIGRHKTYLCYEVERLDNGTWVKMDQHRGFLHNQPRRHAELLFLDLVPSLQLDPAQIYRVTWFISWSPCFSWGCACEVRAFLQENTHVRLRIFAARIADHWPLYKEALQMLRDAGAQVSIMTYDEFKHCWDTFVDHQGLYQPWDGLDEHSQALSRRLRAILQNQGN

SEQ ID NO: 656 - protein, 190 aa, synthetic construct
MEASPASGPRHLMDPHTFYSNFNNKIGRHKTYLCYEVERLDNGTWVKMDQHRGFLHNQPRRHAELLFLDLVPSLQLDPAQIYRVTWFISWSPCFSWGCACEVRAFLQENTHVRLRIFAARIADHWPLYKEALQMLRDAGAQVSIMTYDEFKHCWDTFVDHQRLYKPWDGLDEHSQALSRRLRAILQNQGN

SEQ ID NO: 657 - protein, 187 aa, synthetic construct
MEASPASGPRHLMDPHTFYSNFNNKIGRHKTYLCYEVERLDNGTWVKMDQHRGFLHNQPRRHAELLFLDLVPSLQLDPAQIYRVTWFISWSPCFSWGCACEVRAFLQENTHVRLRIFAARIADHWPLYKEALQMLRDAGAQVSIMTYDEFKHCWDTFVDHQGAPFQPWDGLDEHSQALSRRLRAILQ

SEQ ID NO: 658 - protein, 180 aa, synthetic construct
MDQNIFRFNFINDASVRGQKQTYLCYEVELLDGNSWVPLDEGRGFLLNQPRRHAELCFLDRVSSWHLDPTKHYKFTWFLSWSPCRNCAQEVVAFLGGNSHVSLSIFAPRIADHWSGYEEGLRSLQGAGAHVSIMTSTEFEHCWRTFVDNRGCPFVPWNRLGENSQTISRRLQSILQNGNN

SEQ ID NO: 659 - protein, 180 aa, synthetic construct
MDQNTFYFNFINKASVRGQKQTYLCYEVELLDGNSWVPLDEGRGFLLNQPRRHAELLFLDRVSSWHLDPTKHYKFTWFLSWSPCRNCACEVVAFLGGNSHVSLSIFAPRIYDYYSGYEEGLRSLQGAGAHVSIMTSTEFEHCWRTFVDNRGAPFVPWNRLGENSQTISRRLQSILQNGNN

SEQ ID NO: 660 - protein, 191 aa, synthetic construct
MEASPASGPRHLMDPHTFYSNFNNKIGRHKTYLCYEVERLDNGTWVKMDQHRGFLHNQPRRHAELLFLDLVPSLQLDPAQRYRVTWFISWSPCFSWGCACEVRAFLQENTHVRLRIFAARIADHWPLYKEALQMLRDAGAQVSIMTYDEFKHCWDTFVDHQGAPFQPWDGLDEHSQALSRRLRAILQNQGN

SEQ ID NO: 661 - protein, 191 aa, synthetic construct
MEASPASGPRHLMDPHTFYSNFNNKIGRHKTYLCYEVERLDNGTWVKMDQHRGFLHNQPRRHAELLFLDLVPSLQLDPAQIYRVTWFISWSPCFSWGCACEVRAFLQENTHVRLRIFAARIADHWPLYKEALQMLRDAGAQVSIMTYDEFKHCWDTFVDHQGRPFQPWDGLDEHSQALSRRLRAILQNQGN

SEQ ID NO: 662 - protein, 191 aa, synthetic construct
MEASPASGPRHLMDPHTFYSNFNNKIGRRKTYLCYEVERLDNGTWVKMDQHRGFLHNQPRRHAELLFLDLVPSLQLDPAQIYRVTWFISWSPCFSWGCACEVRAFLQENTHVRLRIFAARIADHWPLYKEALQMLRDAGAQVSIMTYDEFKHCWDTFVDHQGAPFQPWDGLDEHSQALSRRLRAILQNQGN

SEQ ID NO: 663 - protein, 191 aa, synthetic construct
MEASPASGPRHLMDPHTFYSNFNNKIRRHKTYLCYEVERLDNGTWVKMDQHRGFLHNQPRRHAELLFLDLVPSLQLDPAQIYRVTWFISWSPCFSWGCACEVRAFLQENTHVRLRIFAARIADHWPLYKEALQMLRDAGAQVSIMTYDEFKHCWDTFVDHQGAPFQPWDGLDEHSQALSRRLRAILQNQGN

SEQ ID NO: 664 - protein, 175 aa, synthetic construct
MDQDTFWSNFANKERKTYLCYEVELLDGNSWVLLEEGRGFLHNQLRRHAELCFLDRVPSWQLDPAKRYRVTWLLSWSPCTDCARDLVTFLQHNSHVSLRIFTARIATHWKGYEEGLRSLQGAGAHLAIMTSTEFEHCWGTFVHNQGTPFEPWNGLDENSQEESMKLQRILQNEDN

SEQ ID NO: 665 - protein, 175 aa, synthetic construct
MDQDTFWSNFANKERKTYLCYEVELLDGNSWVLLEEGRGFLHNQLRRHAELLFLDRVPSWQLDPAKRYRVTWLLSWSPCTDCACDLVTFLQHNSHVSLRIFTARIATHWKGYEEGLRSLQGAGAHLAIMTSTEFEHCWGTFVHNQGAPFEPWNGLDENSQEESRKLQRILQNEDN

SEQ ID NO: 666 - protein, 191 aa, synthetic construct
MEASPASGPRHLMDPHTFYSNFNNKIGRHKTYLCYEVERLDNGTWVKEDQHRGFLHNQPRRHAELLFLDLVPSLQLDPAQIYRVTWFISWSPCFSWGCACEVRAFLQENTHVRLRIFAARIADHWPLYKEALQMLRDAGAQVSIMTYDEFKHCWDTFVDHQGAPFQPWDGLDEHSQALSRRLRAILQNQGN

SEQ ID NO: 667 - protein, 191 aa, synthetic construct
MEASPASGPRHLMDPHTFYSNFNNKIGRHKTYLCYEVERLDNGTWVKKDQHRGFLHNQPRRHAELLFLDLVPSLQLDPAQIYRVTWFISWSPCFSWGCACEVRAFLQENTHVRLRIFAARIADHWPLYKEALQMLRDAGAQVSIMTYDEFKHCWDTFVDHQGAPFQPWDGLDEHSQALSRRLRAILQNQGN

SEQ ID NO: 668 - protein, 191 aa, synthetic construct
MEASPASGPRHLMDPHTFYSNFNNKIGRHKTYLCYEVERLDNGTWVKQDQHRGFLHNQPRRHAELLFLDLVPSLQLDPAQIYRVTWFISWSPCFSWGCACEVRAFLQENTHVRLRIFAARIADHWPLYKEALQMLRDAGAQVSIMTYDEFKHCWDTFVDHQGAPFQPWDGLDEHSQALSRRLRAILQNQGN

SEQ ID NO: 669 - protein, 191 aa, synthetic construct
MEASPASGPRHLMDPHTFYSNFNNKIGRHKTYLCYEVERLDNGTWVKSDQHRGFLHNQPRRHAELLFLDLVPSLQLDPAQIYRVTWFISWSPCFSWGCACEVRAFLQENTHVRLRIFAARIADHWPLYKEALQMLRDAGAQVSIMTYDEFKHCWDTFVDHQGAPFQPWDGLDEHSQALSRRLRAILQNQGN

SEQ ID NO: 670 - protein, 191 aa, synthetic construct
MEASPASGPRHLMDPHTFYSNFNNKIGRHKTYLCYEVERLDNGTWVKLDQHRGFLHNQPRRHAELLFLDLVPSLQLDPAQIYRVTWFISWSPCFSWGCACEVRAFLQENTHVRLRIFAARIADHWPLYKEALQMLRDAGAQVSIMTYDEFKHCWDTFVDHQGAPFQPWDGLDEHSQALSRRLRAILQNQGN

SEQ ID NO: 671 - protein, 191 aa, synthetic construct
MEASPASGPRHLMDPHTFYSNFNNKIGRHKTYLCYEVERLDNGTWVKDDQHRGFLHNQPRRHAELLFLDLVPSLQLDPAQIYRVTWFISWSPCFSWGCACEVRAFLQENTHVRLRIFAARIADHWPLYKEALQMLRDAGAQVSIMTYDEFKHCWDTFVDHQGAPFQPWDGLDEHSQALSRRLRAILQNQGN

SEQ ID NO: 672 - protein, 191 aa, synthetic construct
MEASPASGPRHLMDPHTFYSNFNNKIGRHKTYLCYEVERLDNGTWVKNDQHRGFLHNQPRRHAELLFLDLVPSLQLDPAQIYRVTWFISWSPCFSWGCACEVRAFLQENTHVRLRIFAARIADHWPLYKEALQMLRDAGAQVSIMTYDEFKHCWDTFVDHQGAPFQPWDGLDEHSQALSRRLRAILQNQGN

SEQ ID NO: 673 - skipped

SEQ ID NO: 674 - protein, 191 aa, synthetic construct
MEASPASGPRHLMDPHTFYSNFNNKIGRHKTYLCYEVERLDNGTWVPMDQHRGFLHNQPRRHAELLFLDLVPSLQLDPAQIYRVTWFISWSPCFSWGCACEVRAFLQENTHVRLRIFAARIADHWPLYKEALQMLRDAGAQVSIMTYDEFKHCWDTFVDHQGAPFQPWDGLDEHSQALSRRLRAILQNQGN

SEQ ID NO: 675 - protein, 191 aa, synthetic construct
MEASPASGPRHAMYPHTFYSNFNNKIGRHKTYLCYEVERLDNGTWVKMDQHRGFLHNQPRRHAELLFLDLVPSLQLDPAQIYRVTWFISWSPCFSWGCACEVRAFLQENTHVRLRIFAARIADHWPLYKEALQMLRDAGAQVSIMTYDEFKHCWDTFVDHQGAPFQPWDGLDEHSQALSRRLRAILQNQGN

SEQ ID NO: 676 - protein, 191 aa, synthetic construct
MEASPASGPRHLMYPHTFYSNFNNKIGRHKTYLCYEVERLDNGTWVKMDQHRGVLHNQPRRHAELLFLDLVPSLQLDPAQIYRVTWFISWSPCFSWGCACEVRAFLQENTHVRLRIFAARIADHWPLYKEALQMLRDAGAQVSIMTYDEFKHCWDTFVDHQGAPFQPWDGLDEHSQALSRRLRAILQNQGN

SEQ ID NO: 677 - protein, 191 aa, synthetic construct
MEASPASGPRHLMYPHTFYSNFNNKIGRHKTYLCYEVERLDNGTWVKMDQHRGFLHNQPRRHAELLFLDLVPSLQLDPAQIYRVTWFISWSPCFSWGCACEVRAFLQENTHVRLRIFAARIADHWPLYKEALQMLRDAGAQVSIMTYDEFKHCWDTFVYHQGAPFQPWDGLDEHSQALSRRLRAILQNQGN

SEQ ID NO: 678 - protein, 191 aa, synthetic construct
MEASPASGPRHLMDPHTFYSNFNNKIGRHKTYLCYEVERLDNGTWVKMDQHRGFLHNQPRRHAELLFLDLVPSLQLDPAQIYRVTWFISWSPCFYWGCACEVRAFLQENTHVRLRIFAARIADHWPLYKEALQMLRDAGAQVSIMTYDEFKHCWDTFVDHQGAPFQPWDGLDEHSQALSRRLRAILQNQGN

SEQ ID NO: 679 - protein, 191 aa, synthetic construct
MEASPASGPRHLMDPHTFYSNFNNKIGRHKTYLCYEVERLDNGTWVKMDQHRGFLHNQPRRHAELLFLDLVPSLQLDPAQIYRVTWFISWSPCFLWGCACEVRAFLQENTHVRLRIFAARIADHWPLYKEALQMLRDAGAQVSIMTYDEFKHCWDTFVDHQGAPFQPWDGLDEHSQALSRRLRAILQNQGN

SEQ ID NO: 680 - protein, 191 aa, synthetic construct
MEASPASGPRHLMDPHTFYSNFNNKIGRHKTYLCYEVERLDNGTWVKMDQHRGFLHNQPRRHAELLFLDLVPSLQLDPAQIYRVTWFISWSPCFMWGCACEVRAFLQENTHVRLRIFAARIADHWPLYKEALQMLRDAGAQVSIMTYDEFKHCWDTFVDHQGAPFQPWDGLDEHSQALSRRLRAILQNQGN

SEQ ID NO: 681 - protein, 191 aa, synthetic construct
MEASPASGPRHLMDPHTFYSNFNNKIGRHKTYLCYEVERLDNGTWVKMDQHRGFLHNQPRRHAELLFLDLVPSLQLDPAQIYRVTWFISWSPCFKWGCACEVRAFLQENTHVRLRIFAARIADHWPLYKEALQMLRDAGAQVSIMTYDEFKHCWDTFVDHQGAPFQPWDGLDEHSQALSRRLRAILQNQGN

SEQ ID NO: 682 - protein, 191 aa, synthetic construct
MEASPASGPRHLMDPHTFYSNFNNKIGRHKTYLCYEVERLDNGTWVKMDQHRGFLHNQPRRHAELLFLDLVPSLQLDPAQIYRVTWFISWSPCFTWGCACEVRAFLQENTHVRLRIFAARIADHWPLYKEALQMLRDAGAQVSIMTYDEFKHCWDTFVDHQGAPFQPWDGLDEHSQALSRRLRAILQNQGN

SEQ ID NO: 683 - protein, 191 aa, synthetic construct
MEASPASGPRHLMDPHTFYSNFNNKIGRHKTYLCYEVERLDNGTWVKMDQHRGFLHNQPRRHAELLFLDLVPSLQLDPAQIYRVTWFISWSPCFIWGCACEVRAFLQENTHVRLRIFAARIADHWPLYKEALQMLRDAGAQVSIMTYDEFKHCWDTFVDHQGAPFQPWDGLDEHSQALSRRLRAILQNQGN

SEQ ID NO: 684 - protein, 191 aa, synthetic construct
MEASPASGPRHLMDPHTFYSNFNNKIGRHKTYLCYEVERLDNGTWVKMDQHRGFLHNQPRRHAELLFLDLVPSLQLDPAQIYRVTWFISWSPCFRWGCACEVRAFLQENTHVRLRIFAARIADHWPLYKEALQMLRDAGAQVSIMTYDEFKHCWDTFVDHQGAPFQPWDGLDEHSQALSRRLRAILQNQGN

SEQ ID NO: 685 - protein, 191 aa, synthetic construct
MEASPASGPRHLMDPHTFYSNFNNKIGRHKTYLCYEVERLDNGTWVKMDQHRGFLHNQPRRHAELLFLDLVPSLQLDPAQIYRVTWFISWSPCFDWGCACEVRAFLQENTHVRLRIFAARIADHWPLYKEALQMLRDAGAQVSIMTYDEFKHCWDTFVDHQGAPFQPWDGLDEHSQALSRRLRAILQNQGN

SEQ ID NO: 686 - protein, 191 aa, synthetic construct
MEASPASGPRHLMDPHTFYSNFNNKIGRHKTYLCYEVERLDNGTWVKMDQHRGFLHNQPRRHAELLFLDLVPSLQLDPAQIYRVTWFISWSPCFQWGCACEVRAFLQENTHVRLRIFAARIADHWPLYKEALQMLRDAGAQVSIMTYDEFKHCWDTFVDHQGAPFQPWDGLDEHSQALSRRLRAILQNQGN

SEQ ID NO: 687 - protein, 191 aa, synthetic construct
MEASPASGPRHLMDPHTFYSNFNNKIGRHKTYLCYEVERLDNGTWVKMDQHRGFLHNQPRRHAELLFLDLVPSLQLDPAQIYRVTWFISWSPCFCWGCACEVRAFLQENTHVRLRIFAARIADHWPLYKEALQMLRDAGAQVSIMTYDEFKHCWDTFVDHQGAPFQPWDGLDEHSQALSRRLRAILQNQGN

SEQ ID NO: 688 - protein, 191 aa, synthetic construct
MEASPASGPRHLMDPHTFYSNFNNKIGRHKTYLCYEVERLDNGTWVKMDQHRGFLHNQPRRHAELLFLDLVPSLQLDPAQIYRVTWFISWSPCFHWGCACEVRAFLQENTHVRLRIFAARIADHWPLYKEALQMLRDAGAQVSIMTYDEFKHCWDTFVDHQGAPFQPWDGLDEHSQALSRRLRAILQNQGN

SEQ ID NO: 689 - protein, 191 aa, synthetic construct
MEASPASGPRHLMDPHTFYSNFNNKIGRHKTYLCYEVERLDNGTWVKMDQHRGFLHNQPRRHAELLFLDLVPSLQLDPAQIYRVTWFISWSPCFSRGCACEVRAFLQENTHVRLRIFAARIADHWPLYKEALQMLRDAGAQVSIMTYDEFKHCWDTFVDHQGAPFQPWDGLDEHSQALSRRLRAILQNQGN

SEQ ID NO: 690 - protein, 191 aa, synthetic construct
MEASPASGPRHLMDPHTFYSNFNNKIGRHKTYLCYEVERLDNGTWVKMDQHRGFLHNQPRRHAELLFLDLVPSLQLDPAQIYRVTWFISWSPCFSLGCACEVRAFLQENTHVRLRIFAARIADHWPLYKEALQMLRDAGAQVSIMTYDEFKHCWDTFVDHQGAPFQPWDGLDEHSQALSRRLRAILQNQGN

SEQ ID NO: 691 - protein, 191 aa, synthetic construct
MEASPASGPRHLMDPHTFYSNFNNKIGRHKTYLCYEVERLDNGTWVKMDQHRGFLHNQPRRHAELLFLDLVPSLQLDPAQIYRVTWFISWSPCFSWWCACEVRAFLQENTHVRLRIFAARIADHWPLYKEALQMLRDAGAQVSIMTYDEFKHCWDTFVDHQGAPFQPWDGLDEHSQALSRRLRAILQNQGN

SEQ ID NO: 692 - protein, 191 aa, synthetic construct
MEASPASGPRHLMDPHTFYSNFNNKIGRHKTYLCYEVERLDNGTWVKMDQHRGFLHNQPRRHAELLFLDLVPSLQLDPAQIYRVTWFISWSPCFSWYCACEVRAFLQENTHVRLRIFAARIADHWPLYKEALQMLRDAGAQVSIMTYDEFKHCWDTFVDHQGAPFQPWDGLDEHSQALSRRLRAILQNQGN

SEQ ID NO: 693 - protein, 191 aa, synthetic construct
MEASPASGPRHLMDPHTFYSNFNNKIGRHKTYLCYEVERLDNGTWVKMDQHRGFLHNQPRRHAELLFLDLVPSLQLDPAQIYRVTWFISWSPCFSWNCACEVRAFLQENTHVRLRIFAARIADHWPLYKEALQMLRDAGAQVSIMTYDEFKHCWDTFVDHQGAPFQPWDGLDEHSQALSRRLRAILQNQGN

SEQ ID NO: 694 - protein, 191 aa, synthetic construct
MEASPASGPRHLMDPHTFYSNFNNKIGRHKTYLCYEVERLDNGTWVKMDQHRGFLHNQPRRHAELLFLDLVPSLQLDPAQIYRVTWFISWSPCFSWKCACEVRAFLQENTHVRLRIFAARIADHWPLYKEALQMLRDAGAQVSIMTYDEFKHCWDTFVDHQGAPFQPWDGLDEHSQALSRRLRAILQNQGN

SEQ ID NO: 695 - protein, 191 aa, synthetic construct
MEASPASGPRHLMDPHTFYSNFNNKIGRHKTYLCYEVERLDNGTWVKMDQHRGFLHNQPRRHAELLFLDLVPSLQLDPAQIYRVTWFISWSPCFSWGCAMEVRAFLQENTHVRLRIFAARIADHWPLYKEALQMLRDAGAQVSIMTYDEFKHCWDTFVDHQGAPFQPWDGLDEHSQALSRRLRAILQNQGN

SEQ ID NO: 696 - protein, 191 aa, synthetic construct
MEASPASGPRHLMDPHTFYSNFNNKIGRHKTYLCYEVERLDNGTWVKMDQHRGFLHNQPRRHAELLFLDLVPSLQLDPAQIYRVTWFISWSPCFSWGCAFEVRAFLQENTHVRLRIFAARIADHWPLYKEALQMLRDAGAQVSIMTYDEFKHCWDTFVDHQGAPFQPWDGLDEHSQALSRRLRAILQNQGN

SEQ ID NO: 697 - protein, 191 aa, synthetic construct
MEASPASGPRHLMDPHTFYSNFNNKIGRHKTYLCYEVERLDNGTWVKMDQHRGFLHNQPRRHAELLFLDLVPSLQLDPAQIYRVTWFISWSPCFSWGCAEEVRAFLQENTHVRLRIFAARIADHWPLYKEALQMLRDAGAQVSIMTYDEFKHCWDTFVDHQGAPFQPWDGLDEHSQALSRRLRAILQNQGN

SEQ ID NO: 698 - protein, 191 aa, synthetic construct
MEASPASGPRHLMDPHTFYSNFNNKIGRHKTYLCYEVERLDNGTWVKMDQHRGFLHNQPRRHAELLFLDLVPSLQLDPAQIYRVTWFISWSPCFSWGCACEVRFFLQENTHVRLRIFAARIADHWPLYKEALQMLRDAGAQVSIMTYDEFKHCWDTFVDHQGAPFQPWDGLDEHSQALSRRLRAILQNQGN

SEQ ID NO: 699 - protein, 191 aa, synthetic construct
MEASPASGPRHLMDPHTFYSNFNNKIGRHKTYLCYEVERLDNGTWVKMDQHRGFLHNQPRRHAELLFLDLVPSLQLDPAQIYRVTWFISWSPCFSWGCACEVRDFLQENTHVRLRIFAARIADHWPLYKEALQMLRDAGAQVSIMTYDEFKHCWDTFVDHQGAPFQPWDGLDEHSQALSRRLRAILQNQGN

SEQ ID NO: 700 - protein, 191 aa, synthetic construct
MEASPASGPRHLMDPHTFYSNFNNKIGRHKTYLCYEVERLDNGTWVKMDQHRGFLHNQPRRHAELLFLDLVPSLQLDPAQIYRVTWFISWSPCFSWGCACEVRHFLQENTHVRLRIFAARIADHWPLYKEALQMLRDAGAQVSIMTYDEFKHCWDTFVDHQGAPFQPWDGLDEHSQALSRRLRAILQNQGN

SEQ ID NO: 701 - protein, 191 aa, synthetic construct
MEASPASGPRHLMDPHTFYSNFNNKIGRHKTYLCYEVERLDNGTWVKMDQHRGFLHNQPRRHAELLFLDLVPSLQLDPAQIYRVTWFISWSPCFSWGCACEVRTFLQENTHVRLRIFAARIADHWPLYKEALQMLRDAGAQVSIMTYDEFKHCWDTFVDHQGAPFQPWDGLDEHSQALSRRLRAILQNQGN

SEQ ID NO: 702 - protein, 191 aa, synthetic construct
MEASPASGPRHLMDPHTFYSNFNNKIGRHKTYLCYEVERLDNGTWVKMDQHRGFLHNQPRRHAELLFLDLVPSLQLDPAQIYRVTWFISWSPCFSWGCACEVRAFGQENTHVRLRIFAARIADHWPLYKEALQMLRDAGAQVSIMTYDEFKHCWDTFVDHQGAPFQPWDGLDEHSQALSRRLRAILQNQGN

SEQ ID NO: 703 - protein, 191 aa, synthetic construct
MEASPASGPRHLMDPHTFYSNFNNKIGRHKTYLCYEVERLDNGTWVKMDQHRGFLHNQPRRHAELLFLDLVPSLQLDPAQIYRVTWFISWSPCFSWGCACEVRAFLKENTHVRLRIFAARIADHWPLYKEALQMLRDAGAQVSIMTYDEFKHCWDTFVDHQGAPFQPWDGLDEHSQALSRRLRAILQNQGN

SEQ ID NO: 704 - protein, 191 aa, synthetic construct
MEASPASGPRHLMDPHTFYSNFNNKIGRHKTYLCYEVERLDNGTWVKMDQHRGFLHNQPRRHAELLFLDLVPSLQLDPAQIYRVTWFISWSPCFSWGCACEVRAFLLENTHVRLRIFAARIADHWPLYKEALQMLRDAGAQVSIMTYDEFKHCWDTFVDHQGAPFQPWDGLDEHSQALSRRLRAILQNQGN

SEQ ID NO: 705 - protein, 191 aa, synthetic construct
MEASPASGPRHLMDPHTFYSNFNNKIGRHKTYLCYEVERLDNGTWVKMDQHRGFLHNQPRRHAELLFLDLVPSLQLDPAQIYRVTWFISWSPCFSWGCACEVRAFLWENTHVRLRIFAARIADHWPLYKEALQMLRDAGAQVSIMTYDEFKHCWDTFVDHQGAPFQPWDGLDEHSQALSRRLRAILQNQGN

SEQ ID NO: 706 - protein, 191 aa, synthetic construct
MEASPASGPRHLMDPHTFYSNFNNKIGRHKTYLCYEVERLDNGTWVKMDQHRGFLHNQPRRHAELLFLDLVPSLQLDPAQIYRVTWFISWSPCFSWGCACEVRAFLMENTHVRLRIFAARIADHWPLYKEALQMLRDAGAQVSIMTYDEFKHCWDTFVDHQGAPFQPWDGLDEHSQALSRRLRAILQNQGN

SEQ ID NO: 707 - protein, 191 aa, synthetic construct
MEASPASGPRHLMDPHTFYSNFNNKIGRHKTYLCYEVERLDNGTWVKMDQHRGFLHNQPRRHAELLFLDLVPSLQLDPAQIYRVTWFISWSPCFSWGCACEVRAFLYENTHVRLRIFAARIADHWPLYKEALQMLRDAGAQVSIMTYDEFKHCWDTFVDHQGAPFQPWDGLDEHSQALSRRLRAILQNQGN

SEQ ID NO: 708 - protein, 191 aa, synthetic construct
MEASPASGPRHLMDPHTFYSNFNNKIGRHKTYLCYEVERLDNGTWVKMDQHRGFLHNQPRRHAELLFLDLVPSLQLDPAQIYRVTWFISWSPCFSWGCACEVRAFLCENTHVRLRIFAARIADHWPLYKEALQMLRDAGAQVSIMTYDEFKHCWDTFVDHQGAPFQPWDGLDEHSQALSRRLRAILQNQGN

SEQ ID NO: 709 - protein, 191 aa, synthetic construct
MEASPASGPRHLMDPHTFYSNFNNKIGRHKTYLCYEVERLDNGTWVKMDQHRGFLHNQPRRHAELLFLDLVPSLQLDPAQIYRVTWFISWSPCFSWGCACEVRAFLQLNTHVRLRIFAARIADHWPLYKEALQMLRDAGAQVSIMTYDEFKHCWDTFVDHQGAPFQPWDGLDEHSQALSRRLRAILQNQGN

SEQ ID NO: 710 - protein, 191 aa, synthetic construct
MEASPASGPRHLMDPHTFYSNFNNKIGRHKTYLCYEVERLDNGTWVKMDQHRGFLHNQPRRHAELLFLDLVPSLQLDPAQIYRVTWFISWSPCFSWGCACEVRAFLQFNTHVRLRIFAARIADHWPLYKEALQMLRDAGAQVSIMTYDEFKHCWDTFVDHQGAPFQPWDGLDEHSQALSRRLRAILQNQGN

SEQ ID NO: 711 - protein, 191 aa, synthetic construct
MEASPASGPRHLMDPHTFYSNFNNKIGRHKTYLCYEVERLDNGTWVKMDQHRGFLHNQPRRHAELLFLDLVPSLQLDPAQIYRVTWFISWSPCFSWGCACEVRAFLQVNTHVRLRIFAARIADHWPLYKEALQMLRDAGAQVSIMTYDEFKHCWDTFVDHQGAPFQPWDGLDEHSQALSRRLRAILQNQGN

SEQ ID NO: 712 - protein, 191 aa, synthetic construct
MEASPASGPRHLMDPHTFYSNFNNKIGRHKTYLCYEVERLDNGTWVKMDQHRGFLHNQPRRHAELLFLDLVPSLQLDPAQIYRVTWFISWSPCFSWGCACEVRAFLQEYTHVRLRIFAARIADHWPLYKEALQMLRDAGAQVSIMTYDEFKHCWDTFVDHQGAPFQPWDGLDEHSQALSRRLRAILQNQGN

SEQ ID NO: 713 - protein, 191 aa, synthetic construct
MEASPASGPRHLMDPHTFYSNFNNKIGRHKTYLCYEVERLDNGTWVKMDQHRGFLHNQPRRHAELLFLDLVPSLQLDPAQIYRVTWFISWSPCFSWGCACEVRAFLQENNHVRLRIFAARIADHWPLYKEALQMLRDAGAQVSIMTYDEFKHCWDTFVDHQGAPFQPWDGLDEHSQALSRRLRAILQNQGN

SEQ ID NO: 714 - protein, 191 aa, synthetic construct
MEASPASGPRHLMDPHTFYSNFNNKIGRHKTYLCYEVERLDNGTWVKMDQHRGFLHNQPRRHAELLFLDLVPSLQLDPAQIYRVTWFISWSPCFSWGCACEVRAFLQENKHVRLRIFAARIADHWPLYKEALQMLRDAGAQVSIMTYDEFKHCWDTFVDHQGAPFQPWDGLDEHSQALSRRLRAILQNQGN

SEQ ID NO: 715 - protein, 191 aa, synthetic construct
MEASPASGPRHLMDPHTFYSNFNNKIGRHKTYLCYEVERLDNGTWVKMDQHRGFLHNQPRRHAELLFLDLVPSLQLDPAQIYRVTWFISWSPCFSWGCACEVRAFLQENTHHRLRIFAARIADHWPLYKEALQMLRDAGAQVSIMTYDEFKHCWDTFVDHQGAPFQPWDGLDEHSQALSRRLRAILQNQGN

SEQ ID NO: 716 - protein, 191 aa, synthetic construct
MEASPASGPRHLMDPHTFYSNFNNKIGRHKTYLCYEVERLDNGTWVKMDQHRGFLHNQPRRHAELLFLDLVPSLQLDPAQIYRVTWFISWSPCFSWGCACEVRAFLQENTHNRLRIFAARIADHWPLYKEALQMLRDAGAQVSIMTYDEFKHCWDTFVDHQGAPFQPWDGLDEHSQALSRRLRAILQNQGN

SEQ ID NO: 717 - protein, 191 aa, synthetic construct
MEASPASGPRHLMDPHTFYSNFNNKIGRHKTYLCYEVERLDNGTWVKMDQHRGFLHNQPRRHAELLFLDLVPSLQLDPAQIYRVTWFISWSPCFSWGCACEVRAFLQENTHVRDRIFAARIADHWPLYKEALQMLRDAGAQVSIMTYDEFKHCWDTFVDHQGAPFQPWDGLDEHSQALSRRLRAILQNQGN

SEQ ID NO: 718 - protein, 191 aa, synthetic construct
MEASPASGPRHLMDPHTFYSNFNNKIGRHKTYLCYEVERLDNGTWVKMDQHRGFLHNQPRRHAELLFLDLVPSLQLDPAQIYRVTWFISWSPCFSWGCACEVRAFLQENTHVRLRIFAARIADHWPWYKEALQMLRDAGAQVSIMTYDEFKHCWDTFVDHQGAPFQPWDGLDEHSQALSRRLRAILQNQGN

SEQ ID NO: 719 - protein, 191 aa, synthetic construct
MEASPASGPRHLMDPHTFYSNFNNKIGRHKTYLCYEVERLDNGTWVKMDQHRGFLHNQPRRHAELLFLDLVPSLQLDPAQIYRVTWFISWSPCFSWGCACEVRAFLQENTHVRLRIFAARIADHWPFYKEALQMLRDAGAQVSIMTYDEFKHCWDTFVDHQGAPFQPWDGLDEHSQALSRRLRAILQNQGN

SEQ ID NO: 720 - protein, 191 aa, synthetic construct
MEASPASGPRHLMDPHTFYSNFNNKIGRHKTYLCYEVERLDNGTWVKMDQHRGFLHNQPRRHAELLFLDLVPSLQLDPAQIYRVTWFISWSPCFSWGCACEVRAFLQENTHVRLRIFAARIADHWPRYKEALQMLRDAGAQVSIMTYDEFKHCWDTFVDHQGAPFQPWDGLDEHSQALSRRLRAILQNQGN

SEQ ID NO: 721 - protein, 191 aa, synthetic construct
MEASPASGPRHLMDPHTFYSNFNNKIGRHKTYLCYEVERLDNGTWVKMDQHRGFLHNQPRRHAELLFLDLVPSLQLDPAQIYRVTWFISWSPCFSWGCACEVRAFLQENTHVRLRIFAARIADHWPQYKEALQMLRDAGAQVSIMTYDEFKHCWDTFVDHQGAPFQPWDGLDEHSQALSRRLRAILQNQGN

SEQ ID NO: 722 - protein, 191 aa, synthetic construct
MEASPASGPRHLMDPHTFYSNFNNKIGRHKTYLCYEVERLDNGTWVKMDQHRGFLHNQPRRHAELLFLDLVPSLQLDPAQIYRVTWFISWSPCFSWGCACEVRAFLQENTHVRLRIFAARIADHWPLDKEALQMLRDAGAQVSIMTYDEFKHCWDTFVDHQGAPFQPWDGLDEHSQALSRRLRAILQNQGN

SEQ ID NO: 723 - protein, 191 aa, synthetic construct
MEASPASGPRHLMDPHTFYSNFNNKIGRHKTYLCYEVERLDNGTWVKMDQHRGFLHNQPRRHAELLFLDLVPSLQLDPAQIYRVTWFISWSPCFSWGCACEVRAFLQENTHVRLRIFAARIADHWPLKKEALQMLRDAGAQVSIMTYDEFKHCWDTFVDHQGAPFQPWDGLDEHSQALSRRLRAILQNQGN

SEQ ID NO: 724 - protein, 191 aa, synthetic construct
MEASPASGPRHLMDPHTFYSNFNNKIGRHKTYLCYEVERLDNGTWVKMDQHRGFLHNQPRRHAELLFLDLVPSLQLDPAQIYRVTWFISWSPCFSWGCACEVRAFLQENTHVRLRIFAARIADHWPLWKEALQMLRDAGAQVSIMTYDEFKHCWDTFVDHQGAPFQPWDGLDEHSQALSRRLRAILQNQGN

SEQ ID NO: 725 - protein, 191 aa, synthetic construct
MEASPASGPRHLMDPHTFYSNFNNKIGRHKTYLCYEVERLDNGTWVKMDQHRGFLHNQPRRHAELLFLDLVPSLQLDPAQIYRVTWFISWSPCFSWGCACEVRAFLQENTHVRLRIFAARIADHWPLYKWALQMLRDAGAQVSIMTYDEFKHCWDTFVDHQGAPFQPWDGLDEHSQALSRRLRAILQNQGN

SEQ ID NO: 726 - protein, 191 aa, synthetic construct
MEASPASGPRHLMDPHTFYSNFNNKIGRHKTYLCYEVERLDNGTWVKMDQHRGFLHNQPRRHAELLFLDLVPSLQLDPAQIYRVTWFISWSPCFSWGCACEVRAFLQENTHVRLRIFAARIADHWPLYKRALQMLRDAGAQVSIMTYDEFKHCWDTFVDHQGAPFQPWDGLDEHSQALSRRLRAILQNQGN

SEQ ID NO: 727 - protein, 191 aa, synthetic construct
MEASPASGPRHLMDPHTFYSNFNNKIGRHKTYLCYEVERLDNGTWVKMDQHRGFLHNQPRRHAELLFLDLVPSLQLDPAQIYRVTWFISWSPCFSWGCACEVRAFLQENTHVRLRIFAARIADHWPLYKQALQMLRDAGAQVSIMTYDEFKHCWDTFVDHQGAPFQPWDGLDEHSQALSRRLRAILQNQGN

SEQ ID NO: 728 - protein, 191 aa, synthetic construct
MEASPASGPRHLMDPHTFYSNFNNKIGRHKTYLCYEVERLDNGTWVKMDQHRGFLHNQPRRHAELLFLDLVPSLQLDPAQIYRVTWFISWSPCFSWGCACEVRAFLQENTHVRLRIFAARIADHWPLYKFALQMLRDAGAQVSIMTYDEFKHCWDTFVDHQGAPFQPWDGLDEHSQALSRRLRAILQNQGN

SEQ ID NO: 729 - protein, 191 aa, synthetic construct
MEASPASGPRHLMDPHTFYSNFNNKIGRHKTYLCYEVERLDNGTWVKMDQHRGFLHNQPRRHAELLFLDLVPSLQLDPAQIYRVTWFISWSPCFSWGCACEVRAFLQENTHVRLRIFAARIADHWPLYKIALQMLRDAGAQVSIMTYDEFKHCWDTFVDHQGAPFQPWDGLDEHSQALSRRLRAILQNQGN

SEQ ID NO: 730 - protein, 191 aa, synthetic construct
MEASPASGPRHLMDPHTFYSNFNNKIGRHKTYLCYEVERLDNGTWVKMDQHRGFLHNQPRRHAELLFLDLVPSLQLDPAQIYRVTWFISWSPCFSWGCACEVRAFLQENTHVRLRIFAARIADHWPLYKLALQMLRDAGAQVSIMTYDEFKHCWDTFVDHQGAPFQPWDGLDEHSQALSRRLRAILQNQGN

SEQ ID NO: 731 - protein, 191 aa, synthetic construct
MEASPASGPRHLMDPHTFYSNFNNKIGRHKTYLCYEVERLDNGTWVKMDQHRGFLHNQPRRHAELLFLDLVPSLQLDPAQIYRVTWFISWSPCFSWGCACEVRAFLQENTHVRLRIFAARIADHWPLYKAALQMLRDAGAQVSIMTYDEFKHCWDTFVDHQGAPFQPWDGLDEHSQALSRRLRAILQNQGN

SEQ ID NO: 732 - protein, 191 aa, synthetic construct
MEASPASGPRHLMDPHTFYSNFNNKIGRHKTYLCYEVERLDNGTWVKMDQHRGFLHNQPRRHAELLFLDLVPSLQLDPAQIYRVTWFISWSPCFSWGCACEVRAFLQENTHVRLRIFAARIADHWPLYKEVLQMLRDAGAQVSIMTYDEFKHCWDTFVDHQGAPFQPWDGLDEHSQALSRRLRAILQNQGN

SEQ ID NO: 733 - protein, 191 aa, synthetic construct
MEASPASGPRHLMDPHTFYSNFNNKIGRHKTYLCYEVERLDNGTWVKMDQHRGFLHNQPRRHAELLFLDLVPSLQLDPAQIYRVTWFISWSPCFSWGCACEVRAFLQENTHVRLRIFAARIADHWPLYKEQLQMLRDAGAQVSIMTYDEFKHCWDTFVDHQGAPFQPWDGLDEHSQALSRRLRAILQNQGN

SEQ ID NO: 734 - protein, 191 aa, synthetic construct
MEASPASGPRHLMDPHTFYSNFNNKIGRHKTYLCYEVERLDNGTWVKMDQHRGFLHNQPRRHAELLFLDLVPSLQLDPAQIYRVTWFISWSPCFSWGCACEVRAFLQENTHVRLRIFAARIADHWPLYKEALQWLRDAGAQVSIMTYDEFKHCWDTFVDHQGAPFQPWDGLDEHSQALSRRLRAILQNQGN

SEQ ID NO: 735 - protein, 191 aa, synthetic construct
MEASPASGPRHLMDPHTFYSNFNNKIGRHKTYLCYEVERLDNGTWVKMDQHRGFLHNQPRRHAELLFLDLVPSLQLDPAQIYRVTWFISWSPCFSWGCACEVRAFLQENTHVRLRIFAARIADHWPLYKEALQMLRRAGAQVSIMTYDEFKHCWDTFVDHQGAPFQPWDGLDEHSQALSRRLRAILQNQGN

SEQ ID NO: 736 - protein, 191 aa, synthetic construct
MEASPASGPRHLMDPHTFYSNFNNKIGRHKTYLCYEVERLDNGTWVKMDQHRGFLHNQPRRHAELLFLDLVPSLQLDPAQIYRVTWFISWSPCFSWGCACEVRAFLQENTHVRLRIFAARIADHWPLYKEALQMLRDEGAQVSIMTYDEFKHCWDTFVDHQGAPFQPWDGLDEHSQALSRRLRAILQNQGN

SEQ ID NO: 737 - protein, 191 aa, synthetic construct
MEASPASGPRHLMDPHTFYSNFNNKIGRHKTYLCYEVERLDNGTWVKMDQHRGFLHNQPRRHAELLFLDLVPSLQLDPAQIYRVTWFISWSPCFSWGCACEVRAFLQENTHVRLRIFAARIADHWPLYKPALQMLRDAGAQVSIMTYDEFKHCWDTFVDHQGAPFQPWDGLDEHSQALSRRLRAILQNQGN

SEQ ID NO: 738 - protein, 191 aa, synthetic construct
MEASPASGPRHLMDPHTFYSNFNNKIGRHKTYLCYEVERLDNGTWVKMDQHRGFLHNQPRRHAELLFLDLVPSLQLDPAQIYRVTWFISWSPCFSWGCACEVRAFLQENTHVRLRIFAARIADHWPLYKMALQMLRDAGAQVSIMTYDEFKHCWDTFVDHQGAPFQPWDGLDEHSQALSRRLRAILQNQGN

SEQ ID NO: 739 - protein, 191 aa, synthetic construct
MEASPASGPRHLMDPHTFYSNFNNKIGRHKTYLCYEVERLDNGTWVKMDQHRGFLHNQPRRHAELLFLDLVPSLQLDPAQIYRVTWFISWSPCNSWGCACEVRAFLQENTHVRLRIFAARIADHWPLYKEALQMLRDAGAQVSIMTYDEFKHCWDTFVDHQGAPFQPWDGLDEHSQALSRRLRAILQNQGN

SEQ ID NO: 740 - protein, 191 aa, synthetic construct
MEASPASGPRHLMDPHTFYSNFNNKIGRHKTYLCYEVERLDNGTWVKMDQHRGFLHNQPRRHAELLFLDLVPSLQLDPAQIYRVTWFISWSPCFSWGCAKEVRAFLQENTHVRLRIFAARIADHWPLYKEALQMLRDAGAQVSIMTYDEFKHCWDTFVDHQGAPFQPWDGLDEHSQALSRRLRAILQNQGN

SEQ ID NO: 741 - protein, 191 aa, synthetic construct
MEASPASGPRHLMDPHTFYSNFNNKIGRHKTYLCYEVERLDNGTWVKMDQHRGFLHNQPRRHAELLFLDLVPSLQLDPAQIYRVTWFISWSPCFSWGCACTVRAFLQENTHVRLRIFAARIADHWPLYKEALQMLRDAGAQVSIMTYDEFKHCWDTFVDHQGAPFQPWDGLDEHSQALSRRLRAILQNQGN

SEQ ID NO: 742 - protein, 191 aa, synthetic construct
MEASPASGPRHLMDPHTFYSNFNNKIGRHKTYLCYEVERLDNGTWVKMDQHRGFLHNQPRRHAELLFLDLVPSLQLDPAQIYRVTWFISWSPCFSWGCACEVEAFLQENTHVRLRIFAARIADHWPLYKEALQMLRDAGAQVSIMTYDEFKHCWDTFVDHQGAPFQPWDGLDEHSQALSRRLRAILQNQGN

SEQ ID NO: 743 - protein, 191 aa, synthetic construct
MEASPASGPRHLMDPHTFYSNFNNKIGRHKTYLCYEVERLDNGTWVKMDQHRGFLHNQPRRHAELLFLDLVPSLQLDPAQIYRVTWFISWSPCFSWGCACEVQAFLQENTHVRLRIFAARIADHWPLYKEALQMLRDAGAQVSIMTYDEFKHCWDTFVDHQGAPFQPWDGLDEHSQALSRRLRAILQNQGN

SEQ ID NO: 744 - protein, 191 aa, synthetic construct
MEASPASGPRHLMDPHTFYSNFNNKIGRHKTYLCYEVERLDNGTWVKMDQHRGFLHNQPRRHAELLFLDLVPSLQLDPAQIYRVTWFISWSPCFSWGCACEVRYFLQENTHVRLRIFAARIADHWPLYKEALQMLRDAGAQVSIMTYDEFKHCWDTFVDHQGAPFQPWDGLDEHSQALSRRLRAILQNQGN

SEQ ID NO: 745 - protein, 191 aa, synthetic construct
MEASPASGPRHLMDPHTFYSNFNNKIGRHKTYLCYEVERLDNGTWVKMDQHRGFLHNQPRRHAELLFLDLVPSLQLDPAQIYRVTWFISWSPCFSWGCACEVRAFLQENTHVRLRIFAARIADHWPLYKEALQLLRDAGAQVSIMTYDEFKHCWDTFVDHQGAPFQPWDGLDEHSQALSRRLRAILQNQGN

SEQ ID NO: 746 - protein, 191 aa, synthetic construct
MEASPASGPRHLMDPHTFYSNFNNKIGRHKTYLCYEVERLDNGTWVKMDQHRGFLHNQPRRHAELLFLDLVPSLQLDPAQIYRVTWFISWSPCFSWGCACEVRAFLQENTHVRLRIFAARIADHWPLYKEALQMLRDGGAQVSIMTYDEFKHCWDTFVDHQGAPFQPWDGLDEHSQALSRRLRAILQNQGN

SEQ ID NO: 747 - protein, 191 aa, synthetic construct
MEASPASGPRHLMDPHTFYSNFNNKIGRHKTYLCYEVERLDNGTWVKMDQHRGFLHNQPRRHAELLFLDLVPSLQLDPAQIYRVTWFISWSPCFSWGCACEVRAFLQENTHVRLRIFSARIADHWPLYKEALQMLRDAGAQVSIMTYDEFKHCWDTFVDHQGAPFQPWDGLDEHSQALSRRLRAILQNQGN

SEQ ID NO: 748 - protein, 191 aa, synthetic construct
MEASPASGPRHLMDPHTFYSNFNNKIGRHKTYLCYEVERLDNGTWVKMDQHRGFLHNQPRRHAELLFLDLVPSLQLDPAQIYRVTWFISWSPCFSWGCASEVRAFLQENTHVRLRIFAARIADHWPLYKEALQMLRDAGAQVSIMTYDEFKHCWDTFVDHQGAPFQPWDGLDEHSQALSRRLRAILQNQGN

SEQ ID NO: 749 - protein, 191 aa, synthetic construct
MEASPASGPRHLMDPHTFYSNFNNKIGRHKTYLCYEVERLDNGTWVKMDQHRGFLHNQPRRHAELLFLDLVPSLQLDPAQIYRVTWFISWSPCFSWGCASEVRAFLQENTHVRLRIFSARIADHWPLYKEALQMLRDAGAQVSIMTYDEFKHCWDTFVDHQGAPFQPWDGLDEHSQALSRRLRAILQNQGN

SEQ ID NO: 750 - protein, 191 aa, synthetic construct
MEASPASGPRHLMDPHTFYSNFNNKIGVHKTYLCYEVERLDNGTWVKMDQHRGFLHNQPRRHAELLFLDLVPSLQLDPAQIYRVTWFISWSPCFSWGCACEVRAFLQENTHVRLRIFAARIADHWPLYKEALQMLRDAGAQVSIMTYDEFKHCWDTFVDHQGAPFQPWDGLDEHSQALSRRLRAILQNQGN

SEQ ID NO: 751 - protein, 191 aa, synthetic construct
MEASPASGPRHWMDPHTFYSNFNNKIGRHKTYLCYEVERLDNGTWVKMDQHRGFLHNQPRRHAELLFLDLVPSLQLDPAQIYRVTWFISWSPCFSWGCACEVRAFLQENTHVRLRIFAARIADHWPLYKEALQMLRDAGAQVSIMTYDEFKHCWDTFVDHQGAPFQPWDGLDEHSQALSRRLRAILQNQGN

SEQ ID NO: 752 - protein, 191 aa, synthetic construct
MEASPASGPRHLMDPHTFYSQFNNKIGRHKTYLCYEVERLDNGTWVKMDQHRGFLHNQPRRHAELLFLDLVPSLQLDPAQIYRVTWFISWSPCFSWGCACEVRAFLQENTHVRLRIFAARIADHWPLYKEALQMLRDAGAQVSIMTYDEFKHCWDTFVDHQGAPFQPWDGLDEHSQALSRRLRAILQNQGN

SEQ ID NO: 753 - protein, 191 aa, synthetic construct
MEASPASGPRELMDPHTFYSNFNNKIGRHKTYLCYEVERLDNGTWVKMDQHRGFLHNQPRRHAELLFLDLVPSLQLDPAQIYRVTWFISWSPCFSWGCACEVRAFLQENTHVRLRIFAARIADHWPLYKEALQMLRDAGAQVSIMTYDEFKHCWDTFVDHQGAPFQPWDGLDEHSQALSRRLRAILQNQGN

SEQ ID NO: 754 - protein, 191 aa, synthetic construct
MEASPASGPRHLMDPHTFYSNFNNKIGRHKTYLCYEVERLDNGTWVKMDQHRGFLRNQPRRHAELLFLDLVPSLQLDPAQIYRVTWFISWSPCFSWGCACEVRAFLQENTHVRLRIFAARIADHWPLYKEALQMLRDAGAQVSIMTYDEFKHCWDTFVDHQGAPFQPWDGLDEHSQALSRRLRAILQNQGN

SEQ ID NO: 755 - protein, 191 aa, synthetic construct
MEASPASGPRHLMDPHTFYSNFNNKIGRHKTYLCYEVERLDNGTWVKMDQHRGFLHNQPRRHAELLFLDLVPWLQLDPAQIYRVTWFISWSPCFSWGCACEVRAFLQENTHVRLRIFAARIADHWPLYKEALQMLRDAGAQVSIMTYDEFKHCWDTFVDHQGAPFQPWDGLDEHSQALSRRLRAILQNQGN

SEQ ID NO: 756 - protein, 190 aa, synthetic construct
MEASPASGPRHLMDPHTFYSNFNNKIGRHKTYLCYEVERLDGTWVKMDQHRGFLHNQPRRHAELLFLDLVPSLQLDPAQIYRVTWFISWSPCFSWGCACEVRAFLQENTHVRLRIFAARIADHWPLYKEALQMLRDAGAQVSIMTYDEFKHCWDTFVDHQGAPFQPWDGLDEHSQALSRRLRAILQNQGN

SEQ ID NO: 757 - protein, 190 aa, synthetic construct
MEASPASGPRHLMDPHTFYSNFNNKIGRHKTYLCYEVERLDPTWVKMDQHRGFLHNQPRRHAELLFLDLVPSLQLDPAQIYRVTWFISWSPCFSWGCACEVRAFLQENTHVRLRIFAARIADHWPLYKEALQMLRDAGAQVSIMTYDEFKHCWDTFVDHQGAPFQPWDGLDEHSQALSRRLRAILQNQGN

SEQ ID NO: 758 - protein, 190 aa, synthetic construct
MEASPASGPRHLMDPHTFYSNFNNKIGRHKTYLCYEVERKDPSWVKMDQHRGFLHNQPRRHAELLFLDLVPSLQLDPAQIYRVTWFISWSPCFSWGCACEVRAFLQENTHVRLRIFAARIADHWPLYKEALQMLRDAGAQVSIMTYDEFKHCWDTFVDHQGAPFQPWDGLDEHSQALSRRLRAILQNQGN

SEQ ID NO: 759 - protein, 191 aa, synthetic construct
MEASPASGPRHLMDPHTFYSNFNNKIGRHKTYLCYEVERLDNGTWVKMDQHRGFLHNQLRRHAELLFLDLVPSLQLDPAQIYRVTWFISWSPCFSWGCACEVRAFLQENTHVRLRIFAARIADHWPLYKEALQMLRDAGAQVSIMTYDEFKHCWDTFVDHQGAPFQPWDGLDEHSQALSRRLRAILQNQGN

SEQ ID NO: 760 - protein, 191 aa, synthetic construct
MEASPASGPRHLMDPHTFYSNFNNKIGRHKTYLCYEVERLDNGTWVKMDQHRGFLHNQAKYHAELLFLDLVPSLQLDPAQIYRVTWFISWSPCFSWGCACEVRAFLQENTHVRLRIFAARIADHWPLYKEALQMLRDAGAQVSIMTYDEFKHCWDTFVDHQGAPFQPWDGLDEHSQALSRRLRAILQNQGN

SEQ ID NO: 761 - protein, 190 aa, synthetic construct
MEASPASGPRHLMDPHTFYSNFNNKIGRHKTYLCYEVERLDNGTWVKMDQHRGFLHNQPRRHAELLFLDLVPSLQLDAQIYRVTWFISWSPCFSWGCACEVRAFLQENTHVRLRIFAARIADHWPLYKEALQMLRDAGAQVSIMTYDEFKHCWDTFVDHQGAPFQPWDGLDEHSQALSRRLRAILQNQGN

SEQ ID NO: 762 - protein, 190 aa, synthetic construct
MEASPASGPRHLMDPHTFYSNFNNKIGRHKTYLCYEVERLDNGTWVKMDQHRGFLHNQPRRHAELLFLDLVPSLQLDGQIYRVTWFISWSPCFSWGCACEVRAFLQENTHVRLRIFAARIADHWPLYKEALQMLRDAGAQVSIMTYDEFKHCWDTFVDHQGAPFQPWDGLDEHSQALSRRLRAILQNQGN

SEQ ID NO: 763 - protein, 189 aa, synthetic construct
MEASPASGPRHLMDPHTFYSNFNNKRHKTYLCYEVERLDNGTWVKMDQHRGFLHNQPRRHAELLFLDLVPSLQLDPAQIYRVTWFISWSPCFSWGCACEVRAFLQENTHVRLRIFAARIADHWPLYKEALQMLRDAGAQVSIMTYDEFKHCWDTFVDHQGAPFQPWDGLDEHSQALSRRLRAILQNQGN

SEQ ID NO: 764 - protein, 189 aa, synthetic construct
MEASPASGPRHLMDPHTFYSNFNNKERKTYLCYEVERLDNGTWVKMDQHRGFLHNQPRRHAELLFLDLVPSLQLDPAQIYRVTWFISWSPCFSWGCACEVRAFLQENTHVRLRIFAARIADHWPLYKEALQMLRDAGAQVSIMTYDEFKHCWDTFVDHQGAPFQPWDGLDEHSQALSRRLRAILQNQGN

SEQ ID NO: 765 - protein, 192 aa, synthetic construct
MEASPASGPRHLMDPHTFYSNFNNGPIGRHKTYLCYEVERLDNGTWVKMDQHRGFLHNQPRRHAELLFLDLVPSLQLDPAQIYRVTWFISWSPCFSWGCACEVRAFLQENTHVRLRIFAARIADHWPLYKEALQMLRDAGAQVSIMTYDEFKHCWDTFVDHQGAPFQPWDGLDEHSQALSRRLRAILQNQGN

SEQ ID NO: 766 - protein, 192 aa, synthetic construct
MEASPASGPRHLMDPHTFYSNFNNDPIGRHKTYLCYEVERLDNGTWVKMDQHRGFLHNQPRRHAELLFLDLVPSLQLDPAQIYRVTWFISWSPCFSWGCACEVRAFLQENTHVRLRIFAARIADHWPLYKEALQMLRDAGAQVSIMTYDEFKHCWDTFVDHQGAPFQPWDGLDEHSQALSRRLRAILQNQGN

SEQ ID NO: 767 - protein, 192 aa, synthetic construct
MEASPASGPRHLMDPHTFYSNFNNEPIGRHKTYLCYEVERLDNGTWVKMDQHRGFLHNQPRRHAELLFLDLVPSLQLDPAQIYRVTWFISWSPCFSWGCACEVRAFLQENTHVRLRIFAARIADHWPLYKEALQMLRDAGAQVSIMTYDEFKHCWDTFVDHQGAPFQPWDGLDEHSQALSRRLRAILQNQGN

SEQ ID NO: 768 - protein, 192 aa, synthetic construct
MEASPASGPRHLMDPHTFYSNFNNRPIGRHKTYLCYEVERLDNGTWVKMDQHRGFLHNQPRRHAELLFLDLVPSLQLDPAQIYRVTWFISWSPCFSWGCACEVRAFLQENTHVRLRIFAARIADHWPLYKEALQMLRDAGAQVSIMTYDEFKHCWDTFVDHQGAPFQPWDGLDEHSQALSRRLRAILQNQGN

SEQ ID NO: 769 - protein, 192 aa, synthetic construct
MEASPASGPRHLMDPHTFYSNFNNKPIGRHKTYLCYEVERLDNGTWVKMDQHRGFLHNQPRRHAELLFLDLVPSLQLDPAQIYRVTWFISWSPCFSWGCACEVRAFLQENTHVRLRIFAARIADHWPLYKEALQMLRDAGAQVSIMTYDEFKHCWDTFVDHQGAPFQPWDGLDEHSQALSRRLRAILQNQGN

SEQ ID NO: 770 - protein, 192 aa, synthetic construct
MEASPASGPRHLMDPHTFYSNFNNDPLGRHKTYLCYEVERLDNGTWVKMDQHRGFLHNQPRRHAELLFLDLVPSLQLDPAQIYRVTWFISWSPCFSWGCACEVRAFLQENTHVRLRIFAARIADHWPLYKEALQMLRDAGAQVSIMTYDEFKHCWDTFVDHQGAPFQPWDGLDEHSQALSRRLRAILQNQGN

SEQ ID NO: 771 - protein, 192 aa, synthetic construct
MEASPASGPRHLMDPHTFYSNFNNEPLGRHKTYLCYEVERLDNGTWVKMDQHRGFLHNQPRRHAELLFLDLVPSLQLDPAQIYRVTWFISWSPCFSWGCACEVRAFLQENTHVRLRIFAARIADHWPLYKEALQMLRDAGAQVSIMTYDEFKHCWDTFVDHQGAPFQPWDGLDEHSQALSRRLRAILQNQGN

SEQ ID NO: 772 - protein, 192 aa, synthetic construct
MEASPASGPRHLMDPHTFYSNFNNRPLGRHKTYLCYEVERLDNGTWVKMDQHRGFLHNQPRRHAELLFLDLVPSLQLDPAQIYRVTWFISWSPCFSWGCACEVRAFLQENTHVRLRIFAARIADHWPLYKEALQMLRDAGAQVSIMTYDEFKHCWDTFVDHQGAPFQPWDGLDEHSQALSRRLRAILQNQGN

SEQ ID NO: 773 - protein, 192 aa, synthetic construct
MEASPASGPRHLMDPHTFYSNFNNKPLGRHKTYLCYEVERLDNGTWVKMDQHRGFLHNQPRRHAELLFLDLVPSLQLDPAQIYRVTWFISWSPCFSWGCACEVRAFLQENTHVRLRIFAARIADHWPLYKEALQMLRDAGAQVSIMTYDEFKHCWDTFVDHQGAPFQPWDGLDEHSQALSRRLRAILQNQGN

SEQ ID NO: 774 - protein, 192 aa, synthetic construct
MEASPASGPRHLMDPHTFYSNFNNGSIGRHKTYLCYEVERLDNGTWVKMDQHRGFLHNQPRRHAELLFLDLVPSLQLDPAQIYRVTWFISWSPCFSWGCACEVRAFLQENTHVRLRIFAARIADHWPLYKEALQMLRDAGAQVSIMTYDEFKHCWDTFVDHQGAPFQPWDGLDEHSQALSRRLRAILQNQGN

SEQ ID NO: 775 - protein, 192 aa, synthetic construct
MEASPASGPRHLMDPHTFYSNFNNDSIGRHKTYLCYEVERLDNGTWVKMDQHRGFLHNQPRRHAELLFLDLVPSLQLDPAQIYRVTWFISWSPCFSWGCACEVRAFLQENTHVRLRIFAARIADHWPLYKEALQMLRDAGAQVSIMTYDEFKHCWDTFVDHQGAPFQPWDGLDEHSQALSRRLRAILQNQGN

SEQ ID NO: 776 - protein, 192 aa, synthetic construct
MEASPASGPRHLMDPHTFYSNFNNKSIGRHKTYLCYEVERLDNGTWVKMDQHRGFLHNQPRRHAELLFLDLVPSLQLDPAQIYRVTWFISWSPCFSWGCACEVRAFLQENTHVRLRIFAARIADHWPLYKEALQMLRDAGAQVSIMTYDEFKHCWDTFVDHQGAPFQPWDGLDEHSQALSRRLRAILQNQGN

SEQ ID NO: 777 - protein, 192 aa, synthetic construct
MEASPASGPRHLMDPHTFYSNFNNGIIGRHKTYLCYEVERLDNGTWVKMDQHRGFLHNQPRRHAELLFLDLVPSLQLDPAQIYRVTWFISWSPCFSWGCACEVRAFLQENTHVRLRIFAARIADHWPLYKEALQMLRDAGAQVSIMTYDEFKHCWDTFVDHQGAPFQPWDGLDEHSQALSRRLRAILQNQGN

SEQ ID NO: 778 - protein, 192 aa, synthetic construct
MEASPASGPRHLMDPHTFYSNFNNEIIGRHKTYLCYEVERLDNGTWVKMDQHRGFLHNQPRRHAELLFLDLVPSLQLDPAQIYRVTWFISWSPCFSWGCACEVRAFLQENTHVRLRIFAARIADHWPLYKEALQMLRDAGAQVSIMTYDEFKHCWDTFVDHQGAPFQPWDGLDEHSQALSRRLRAILQNQGN

SEQ ID NO: 779 - protein, 192 aa, synthetic construct
MEASPASGPRHLMDPHTFYSNFNNKIIGRHKTYLCYEVERLDNGTWVKMDQHRGFLHNQPRRHAELLFLDLVPSLQLDPAQIYRVTWFISWSPCFSWGCACEVRAFLQENTHVRLRIFAARIADHWPLYKEALQMLRDAGAQVSIMTYDEFKHCWDTFVDHQGAPFQPWDGLDEHSQALSRRLRAILQNQGN

SEQ ID NO: 780 - protein, 192 aa, synthetic construct
MEASPASGPRHLMDPHTFYSNFNNGSLGRHKTYLCYEVERLDNGTWVKMDQHRGFLHNQPRRHAELLFLDLVPSLQLDPAQIYRVTWFISWSPCFSWGCACEVRAFLQENTHVRLRIFAARIADHWPLYKEALQMLRDAGAQVSIMTYDEFKHCWDTFVDHQGAPFQPWDGLDEHSQALSRRLRAILQNQGN

SEQ ID NO: 781 - protein, 192 aa, synthetic construct
MEASPASGPRHLMDPHTFYSNFNNDSLGRHKTYLCYEVERLDNGTWVKMDQHRGFLHNQPRRHAELLFLDLVPSLQLDPAQIYRVTWFISWSPCFSWGCACEVRAFLQENTHVRLRIFAARIADHWPLYKEALQMLRDAGAQVSIMTYDEFKHCWDTFVDHQGAPFQPWDGLDEHSQALSRRLRAILQNQGN

SEQ ID NO: 782 - protein, 192 aa, synthetic construct
MEASPASGPRHLMDPHTFYSNFNNKSLGRHKTYLCYEVERLDNGTWVKMDQHRGFLHNQPRRHAELLFLDLVPSLQLDPAQIYRVTWFISWSPCFSWGCACEVRAFLQENTHVRLRIFAARIADHWPLYKEALQMLRDAGAQVSIMTYDEFKHCWDTFVDHQGAPFQPWDGLDEHSQALSRRLRAILQNQGN

SEQ ID NO: 783 - protein, 192 aa, synthetic construct
MEASPASGPRHLMDPHTFYSNFNNGIYGRHKTYLCYEVERLDNGTWVKMDQHRGFLHNQPRRHAELLFLDLVPSLQLDPAQIYRVTWFISWSPCFSWGCACEVRAFLQENTHVRLRIFAARIADHWPLYKEALQMLRDAGAQVSIMTYDEFKHCWDTFVDHQGAPFQPWDGLDEHSQALSRRLRAILQNQGN

SEQ ID NO: 784 - protein, 192 aa, synthetic construct
MEASPASGPRHLMDPHTFYSNFNNEIYGRHKTYLCYEVERLDNGTWVKMDQHRGFLHNQPRRHAELLFLDLVPSLQLDPAQIYRVTWFISWSPCFSWGCACEVRAFLQENTHVRLRIFAARIADHWPLYKEALQMLRDAGAQVSIMTYDEFKHCWDTFVDHQGAPFQPWDGLDEHSQALSRRLRAILQNQGN

SEQ ID NO: 785 - protein, 192 aa, synthetic construct
MEASPASGPRHLMDPHTFYSNFNNKIYGRHKTYLCYEVERLDNGTWVKMDQHRGFLHNQPRRHAELLFLDLVPSLQLDPAQIYRVTWFISWSPCFSWGCACEVRAFLQENTHVRLRIFAARIADHWPLYKEALQMLRDAGAQVSIMTYDEFKHCWDTFVDHQGAPFQPWDGLDEHSQALSRRLRAILQNQGN

SEQ ID NO: 786 - protein, 192 aa, synthetic construct
MEASPASGPRHLMDPHTFYSNFNNGVIGRHKTYLCYEVERLDNGTWVKMDQHRGFLHNQPRRHAELLFLDLVPSLQLDPAQIYRVTWFISWSPCFSWGCACEVRAFLQENTHVRLRIFAARIADHWPLYKEALQMLRDAGAQVSIMTYDEFKHCWDTFVDHQGAPFQPWDGLDEHSQALSRRLRAILQNQGN

SEQ ID NO: 787 - protein, 192 aa, synthetic construct
MEASPASGPRHLMDPHTFYSNFNNDVIGRHKTYLCYEVERLDNGTWVKMDQHRGFLHNQPRRHAELLFLDLVPSLQLDPAQIYRVTWFISWSPCFSWGCACEVRAFLQENTHVRLRIFAARIADHWPLYKEALQMLRDAGAQVSIMTYDEFKHCWDTFVDHQGAPFQPWDGLDEHSQALSRRLRAILQNQGN

SEQ ID NO: 788 - protein, 192 aa, synthetic construct
MEASPASGPRHLMDPHTFYSNFNNKVIGRHKTYLCYEVERLDNGTWVKMDQHRGFLHNQPRRHAELLFLDLVPSLQLDPAQIYRVTWFISWSPCFSWGCACEVRAFLQENTHVRLRIFAARIADHWPLYKEALQMLRDAGAQVSIMTYDEFKHCWDTFVDHQGAPFQPWDGLDEHSQALSRRLRAILQNQGN

SEQ ID NO: 789 - protein, 192 aa, synthetic construct
MEASPASGPRHLMDPHTFYSNFNNGVLGRHKTYLCYEVERLDNGTWVKMDQHRGFLHNQPRRHAELLFLDLVPSLQLDPAQIYRVTWFISWSPCFSWGCACEVRAFLQENTHVRLRIFAARIADHWPLYKEALQMLRDAGAQVSIMTYDEFKHCWDTFVDHQGAPFQPWDGLDEHSQALSRRLRAILQNQGN

SEQ ID NO: 790 - protein, 192 aa, synthetic construct
MEASPASGPRHLMDPHTFYSNFNNDVLGRHKTYLCYEVERLDNGTWVKMDQHRGFLHNQPRRHAELLFLDLVPSLQLDPAQIYRVTWFISWSPCFSWGCACEVRAFLQENTHVRLRIFAARIADHWPLYKEALQMLRDAGAQVSIMTYDEFKHCWDTFVDHQGAPFQPWDGLDEHSQALSRRLRAILQNQGN

SEQ ID NO: 791 - protein, 192 aa, synthetic construct
MEASPASGPRHLMDPHTFYSNFNNKVLGRHKTYLCYEVERLDNGTWVKMDQHRGFLHNQPRRHAELLFLDLVPSLQLDPAQIYRVTWFISWSPCFSWGCACEVRAFLQENTHVRLRIFAARIADHWPLYKEALQMLRDAGAQVSIMTYDEFKHCWDTFVDHQGAPFQPWDGLDEHSQALSRRLRAILQNQGN

SEQ ID NO: 792 - protein, 192 aa, synthetic construct
MEASPASGPRHLMDPHTFYSNFNNKAIGRHKTYLCYEVERLDNGTWVKMDQHRGFLHNQPRRHAELLFLDLVPSLQLDPAQIYRVTWFISWSPCFSWGCACEVRAFLQENTHVRLRIFAARIADHWPLYKEALQMLRDAGAQVSIMTYDEFKHCWDTFVDHQGAPFQPWDGLDEHSQALSRRLRAILQNQGN

SEQ ID NO: 793 - protein, 194 aa, synthetic construct
MEASPASGPRHLMDPHTFYSNFNNVEYGIGRHKTYLCYEVERLDNGTWVKMDQHRGFLHNQPRRHAELLFLDLVPSLQLDPAQIYRVTWFISWSPCFSWGCACEVRAFLQENTHVRLRIFAARIADHWPLYKEALQMLRDAGAQVSIMTYDEFKHCWDTFVDHQGAPFQPWDGLDEHSQALSRRLRAILQNQGN

SEQ ID NO: 794 - protein, 194 aa, synthetic construct
MEASPASGPRHLMDPHTFYSNFNNVEYSIGRHKTYLCYEVERLDNGTWVKMDQHRGFLHNQPRRHAELLFLDLVPSLQLDPAQIYRVTWFISWSPCFSWGCACEVRAFLQENTHVRLRIFAARIADHWPLYKEALQMLRDAGAQVSIMTYDEFKHCWDTFVDHQGAPFQPWDGLDEHSQALSRRLRAILQNQGN

SEQ ID NO: 795 - protein, 194 aa, synthetic construct
MEASPASGPRHLMDPHTFYSNFNNVEYKIGRHKTYLCYEVERLDNGTWVKMDQHRGFLHNQPRRHAELLFLDLVPSLQLDPAQIYRVTWFISWSPCFSWGCACEVRAFLQENTHVRLRIFAARIADHWPLYKEALQMLRDAGAQVSIMTYDEFKHCWDTFVDHQGAPFQPWDGLDEHSQALSRRLRAILQNQGN

SEQ ID NO: 796 - protein, 194 aa, synthetic construct
MEASPASGPRHLMDPHTFYSNFNNAAAKIGRHKTYLCYEVERLDNGTWVKMDQHRGFLHNQPRRHAELLFLDLVPSLQLDPAQIYRVTWFISWSPCFSWGCACEVRAFLQENTHVRLRIFAARIADHWPLYKEALQMLRDAGAQVSIMTYDEFKHCWDTFVDHQGAPFQPWDGLDEHSQALSRRLRAILQNQGN

SEQ ID NO: 797 - protein, 192 aa, synthetic construct
MEASPASGPRHLMDPHTFYSNFNNKIGRHKTYLCYEVERLDNGTWVKMDQHRGFLHNQPRRHAELLFLDLVPSLQLDPAQIYRVTWFISWSPCFSWGCACEVRAFLQENTHVRLRIFAARIAYDHWPLYKEALQMLRDAGAQVSIMTYDEFKHCWDTFVDHQGAPFQPWDGLDEHSQALSRRLRAILQNQGN

SEQ ID NO: 798 - protein, 192 aa, synthetic construct
MEASPASGPRHLMDPHTFYSNFNNKIGRHKTYLCYEVERLDNGTWVKMDQHRGFLHNQPRRHAELLFLDLVPSLQLDPAQIYRVTWFISWSPCFSWGCACEVRAFLQENTHVRLRIFAARIAYHHWPLYKEALQMLRDAGAQVSIMTYDEFKHCWDTFVDHQGAPFQPWDGLDEHSQALSRRLRAILQNQGN

SEQ ID NO: 799 - protein, 192 aa, synthetic construct
MEASPASGPRHLMDPHTFYSNFNNKIGRHKTYLCYEVERLDNGTWVKMDQHRGFLHNQPRRHAELLFLDLVPSLQLDPAQIYRVTWFISWSPCFSWGCACEVRAFLQENTHVRLRIFAARIAYFHWPLYKEALQMLRDAGAQVSIMTYDEFKHCWDTFVDHQGAPFQPWDGLDEHSQALSRRLRAILQNQGN

SEQ ID NO: 800 - protein, 192 aa, synthetic construct
MEASPASGPRHLMDPHTFYSNFNNKIGRHKTYLCYEVERLDNGTWVKMDQHRGFLHNQPRRHAELLFLDLVPSLQLDPAQIYRVTWFISWSPCFSWGCACEVRAFLQENTHVRLRIFAARIAYHWWPLYKEALQMLRDAGAQVSIMTYDEFKHCWDTFVDHQGAPFQPWDGLDEHSQALSRRLRAILQNQGN

SEQ ID NO: 801 - protein, 192 aa, synthetic construct
MEASPASGPRHLMDPHTFYSNFNNKIGRHKTYLCYEVERLDNGTWVKMDQHRGFLHNQPRRHAELLFLDLVPSLQLDPAQIYRVTWFISWSPCFSWGCACEVRAFLQENTHVRLRIFAARIAYFWWPLYKEALQMLRDAGAQVSIMTYDEFKHCWDTFVDHQGAPFQPWDGLDEHSQALSRRLRAILQNQGN

SEQ ID NO: 802 - protein, 192 aa, synthetic construct
MEASPASGPRHLMDPHTFYSNFNNKIGRHKTYLCYEVERLDNGTWVKMDQHRGFLHNQPRRHAELLFLDLVPSLQLDPAQIYRVTWFISWSPCFSWGCACEVRAFLQENTHVRLRIFAARIAYHWDPHYKEALQMLRDAGAQVSIMTYDEFKHCWDTFVDHQGAPFQPWDGLDEHSQALSRRLRAILQNQGN

SEQ ID NO: 803 - protein, 192 aa, synthetic construct
MEASPASGPRHLMDPHTFYSNFNNKIGRHKTYLCYEVERLDNGTWVKMDQHRGFLHNQPRRHAELLFLDLVPSLQLDPAQIYRVTWFISWSPCFSWGCACEVRAFLQENTHVRLRIFAARIAYFWDPHYKEALQMLRDAGAQVSIMTYDEFKHCWDTFVDHQGAPFQPWDGLDEHSQALSRRLRAILQNQGN

SEQ ID NO: 804 - protein, 192 aa, synthetic construct
MEASPASGPRHLMDPHTFYSNFNNKIGRHKTYLCYEVERLDNGTWVKMDQHRGFLHNQPRRHAELLFLDLVPSLQLDPAQIYRVTWFISWSPCFSWGCACEVRAFLQENTHVRLRIFAARIYYHWDPHYKEALQMLRDAGAQVSIMTYDEFKHCWDTFVDHQGAPFQPWDGLDEHSQALSRRLRAILQNQGN

SEQ ID NO: 805 - protein, 192 aa, synthetic construct
MEASPASGPRHLMDPHTFYSNFNNKIGRHKTYLCYEVERLDNGTWVKMDQHRGFLHNQPRRHAELLFLDLVPSLQLDPAQIYRVTWFISWSPCFSWGCACEVRAFLQENTHVRLRIFAARIYYFWDPHYKEALQMLRDAGAQVSIMTYDEFKHCWDTFVDHQGAPFQPWDGLDEHSQALSRRLRAILQNQGN

SEQ ID NO: 806 - protein, 192 aa, synthetic construct
MEASPASGPRHLMDPHTFYSNFNNKIGRHKTYLCYEVERLDNGTWVKMDQHRGFLHNQPRRHAELLFLDLVPSLQLDPAQIYRVTWFISWSPCFSWGCACEVRAFLQENTHVRLRIFAARIAADHWPLYKEALQMLRDAGAQVSIMTYDEFKHCWDTFVDHQGAPFQPWDGLDEHSQALSRRLRAILQNQGN

SEQ ID NO: 807 - protein, 192 aa, synthetic construct
MEASPASGPRHLMDPHTFYSNFNNKIGRHKTYLCYEVERLDNGTWVKMDQHRGFLHNQPRRHAELLFLDLVPSLQLDPAQIYRVTWFISWSPCFSWGCACEVRAFLQENTHVRLRIFAARIADFHWPLYKEALQMLRDAGAQVSIMTYDEFKHCWDTFVDHQGAPFQPWDGLDEHSQALSRRLRAILQNQGN

SEQ ID NO: 808 - protein, 192 aa, synthetic construct
MEASPASGPRHLMDPHTFYSNFNNKIGRHKTYLCYEVERLDNGTWVKMDQHRGFLHNQPRRHAELLFLDLVPSLQLDPAQIYRVTWFISWSPCFSWGCACEVRAFLQENTHVRLRIFAARIAYFWDPLYKEALQMLRDAGAQVSIMTYDEFKHCWDTFVDHQGAPFQPWDGLDEHSQALSRRLRAILQNQGN

SEQ ID NO: 809 - protein, 192 aa, synthetic construct
MEASPASGPRHLMDPHTFYSNFNNKIGRHKTYLCYEVERLDNGTWVKMDQHRGFLHNQPRRHAELLFLDLVPSLQLDPAQIYRVTWFISWSPCFSWGCACEVRAFLQENTHVRLRIFAARIAYFWDPDYKEALQMLRDAGAQVSIMTYDEFKHCWDTFVDHQGAPFQPWDGLDEHSQALSRRLRAILQNQGN

SEQ ID NO: 810 - protein, 192 aa, synthetic construct
MEASPASGPRHLMDPHTFYSNFNNKIGRHKTYLCYEVERLDNGTWVKMDQHRGFLHNQPRRHAELLFLDLVPSLQLDPAQIYRVTWFISWSPCFSWGCACEVRAFLQENTHVRLRIFAARIYYFWDPDYKEALQMLRDAGAQVSIMTYDEFKHCWDTFVDHQGAPFQPWDGLDEHSQALSRRLRAILQNQGN

SEQ ID NO: 811 - protein, 192 aa, synthetic construct
MEASPASGPRHLMDPHTFYSNFNNKIGRHKTYLCYEVERLDNGTWVKMDQHRGFLHNQPRRHAELLFLDLVPSLQLDPAQIYRVTWFISWSPCFSWGCACEVRAFLQENTHVRLRIFAARIADAHWPLYKEALQMLRDAGAQVSIMTYDEFKHCWDTFVDHQGAPFQPWDGLDEHSQALSRRLRAILQNQGN

SEQ ID NO: 812 - protein, 192 aa, synthetic construct
MEASPASGPRHLMDPHTFYSNFNNKIGRHKTYLCYEVERLDNGTWVKMDQHRGFLHNQPRRHAELLFLDLVPSLQLDPAQIYRVTWFISWSPCFSWGCACEVRAFLQENTHVRLRIFAARIADHEWPLYKEALQMLRDAGAQVSIMTYDEFKHCWDTFVDHQGAPFQPWDGLDEHSQALSRRLRAILQNQGN

SEQ ID NO: 813 - protein, 192 aa, synthetic construct
MEASPASGPRHLMDPHTFYSNFNNKIGRHKTYLCYEVERLDNGTWVKMDQHRGFLHNQPRRHAELLFLDLVPSLQLDPAQIYRVTWFISWSPCFSWGCACEVRAFLQENTHVRLRIFAARIADHEEPLYKEALQMLRDAGAQVSIMTYDEFKHCWDTFVDHQGAPFQPWDGLDEHSQALSRRLRAILQNQGN

SEQ ID NO: 814 - protein, 192 aa, synthetic construct
MEASPASGPRHLMDPHTFYSNFNNKIGRHKTYLCYEVERLDNGTWVKMDQHRGFLHNQPRRHAELLFLDLVPSLQLDPAQIYRVTWFISWSPCFSWGCACEVRAFLQENTHVRLRIFAARIADWEEPLYKEALQMLRDAGAQVSIMTYDEFKHCWDTFVDHQGAPFQPWDGLDEHSQALSRRLRAILQNQGN

SEQ ID NO: 815 - protein, 192 aa, synthetic construct
MEASPASGPRHLMDPHTFYSNFNNKIGRHKTYLCYEVERLDNGTWVKMDQHRGFLHNQPRRHAELLFLDLVPSLQLDPAQIYRVTWFISWSPCFSWGCACEVRAFLQENTHVRLRIFAARIAMWEEPLYKEALQMLRDAGAQVSIMTYDEFKHCWDTFVDHQGAPFQPWDGLDEHSQALSRRLRAILQNQGN

SEQ ID NO: 816 - protein, 192 aa, synthetic construct
MEASPASGPRHLMDPHTFYSNFNNKIGRHKTYLCYEVERLDNGTWVKMDQHRGFLHNQPRRHAELLFLDLVPSLQLDPAQIYRVTWFISWSPCFSWGCACEVRAFLQENTHVRLRIFAARIAMWEEPEYKEALQMLRDAGAQVSIMTYDEFKHCWDTFVDHQGAPFQPWDGLDEHSQALSRRLRAILQNQGN

SEQ ID NO: 817 - protein, 192 aa, synthetic construct
MEASPASGPRHLMDPHTFYSNFNNKIGRHKTYLCYEVERLDNGTWVKMDQHRGFLHNQPRRHAELLFLDLVPSLQLDPAQIYRVTWFISWSPCFSWGCACEVRAFLQENTHVRLRIFAARIFMWEEPEYKEALQMLRDAGAQVSIMTYDEFKHCWDTFVDHQGAPFQPWDGLDEHSQALSRRLRAILQNQGN

SEQ ID NO: 818 - protein, 192 aa, synthetic construct
MEASPASGPRHLMDPHTFYSNFNNKIGRHKTYLCYEVERLDNGTWVKMDQHRGFLHNQPRRHAELLFLDLVPSLQLDPAQIYRVTWFISWSPCFSWGCACEVRAFLQENTHVRLRIFAARIADHAWPLYKEALQMLRDAGAQVSIMTYDEFKHCWDTFVDHQGAPFQPWDGLDEHSQALSRRLRAILQNQGN

SEQ ID NO: 819 - protein, 192 aa, synthetic construct
MEASPASGPRHLMDPHTFYSNFNNKIGRHKTYLCYEVERLDNGTWVKMDQHRGFLHNQPRRHAELLFLDLVPSLQLDPAQIYRVTWFISWSPCFSWGCACEVRAFLQENTHVRLRIFAARIADHWPKLYKEALQMLRDAGAQVSIMTYDEFKHCWDTFVDHQGAPFQPWDGLDEHSQALSRRLRAILQNQGN

SEQ ID NO: 820 - protein, 192 aa, synthetic construct
MEASPASGPRHLMDPHTFYSNFNNKIGRHKTYLCYEVERLDNGTWVKMDQHRGFLHNQPRRHAELLFLDLVPSLQLDPAQIYRVTWFISWSPCFSWGCACEVRAFLQENTHVRLRIFAARIADHWPKAYKEALQMLRDAGAQVSIMTYDEFKHCWDTFVDHQGAPFQPWDGLDEHSQALSRRLRAILQNQGN

SEQ ID NO: 821 - protein, 192 aa, synthetic construct
MEASPASGPRHLMDPHTFYSNFNNKIGRHKTYLCYEVERLDNGTWVKMDQHRGFLHNQPRRHAELLFLDLVPSLQLDPAQIYRVTWFISWSPCFSWGCACEVRAFLQENTHVRLRIFAARIADHWDKAYKEALQMLRDAGAQVSIMTYDEFKHCWDTFVDHQGAPFQPWDGLDEHSQALSRRLRAILQNQGN

SEQ ID NO: 822 - protein, 192 aa, synthetic construct
MEASPASGPRHLMDPHTFYSNFNNKIGRHKTYLCYEVERLDNGTWVKMDQHRGFLHNQPRRHAELLFLDLVPSLQLDPAQIYRVTWFISWSPCFSWGCACEVRAFLQENTHVRLRIFAARIADHEDKAYKEALQMLRDAGAQVSIMTYDEFKHCWDTFVDHQGAPFQPWDGLDEHSQALSRRLRAILQNQGN

SEQ ID NO: 823 - protein, 192 aa, synthetic construct
MEASPASGPRHLMDPHTFYSNFNNKIGRHKTYLCYEVERLDNGTWVKMDQHRGFLHNQPRRHAELLFLDLVPSLQLDPAQIYRVTWFISWSPCFSWGCACEVRAFLQENTHVRLRIFAARIADCEDKAYKEALQMLRDAGAQVSIMTYDEFKHCWDTFVDHQGAPFQPWDGLDEHSQALSRRLRAILQNQGN

SEQ ID NO: 824 - protein, 192 aa, synthetic construct
MEASPASGPRHLMDPHTFYSNFNNKIGRHKTYLCYEVERLDNGTWVKMDQHRGFLHNQPRRHAELLFLDLVPSLQLDPAQIYRVTWFISWSPCFSWGCACEVRAFLQENTHVRLRIFAARIAFCEDKAYKEALQMLRDAGAQVSIMTYDEFKHCWDTFVDHQGAPFQPWDGLDEHSQALSRRLRAILQNQGN

SEQ ID NO: 825 - protein, 192 aa, synthetic construct
MEASPASGPRHLMDPHTFYSNFNNKIGRHKTYLCYEVERLDNGTWVKMDQHRGFLHNQPRRHAELLFLDLVPSLQLDPAQIYRVTWFISWSPCFSWGCACEVRAFLQENTHVRLRIFAARIYFCEDKAYKEALQMLRDAGAQVSIMTYDEFKHCWDTFVDHQGAPFQPWDGLDEHSQALSRRLRAILQNQGN

SEQ ID NO: 826 - protein, 192 aa, synthetic construct
MEASPASGPRHLMDPHTFYSNFNNKIGRHKTYLCYEVERLDNGTWVKMDQHRGFLHNQPRRHAELLFLDLVPSLQLDPAQIYRVTWFISWSPCFSWGCACEVRAFLQENTHVRLRIFAARIADHWPALYKEALQMLRDAGAQVSIMTYDEFKHCWDTFVDHQGAPFQPWDGLDEHSQALSRRLRAILQNQGN

SEQ ID NO: 827 - protein, 192 aa, synthetic construct
MEASPASGPRHLMDPHTFYSNFNNKIGRHKTYLCYEVERLDNGTWVKMDQHRGFLHNQPRRHAELLFLDLVPSLQLDPAQIYRVTWFISWSPCFSWGCACEVRAFLQENTHVRLRIFAARIADHWWPLYKEALQMLRDAGAQVSIMTYDEFKHCWDTFVDHQGAPFQPWDGLDEHSQALSRRLRAILQNQGN

SEQ ID NO: 828 - protein, 192 aa, synthetic construct
MEASPASGPRHLMDPHTFYSNFNNKIGRHKTYLCYEVERLDNGTWVKMDQHRGFLHNQPRRHAELLFLDLVPSLQLDPAQIYRVTWFISWSPCFSWGCACEVRAFLQENTHVRLRIFAARIADHWEPLYKEALQMLRDAGAQVSIMTYDEFKHCWDTFVDHQGAPFQPWDGLDEHSQALSRRLRAILQNQGN

SEQ ID NO: 829 - protein, 192 aa, synthetic construct
MEASPASGPRHLMDPHTFYSNFNNKIAGRHKTYLCYEVERLDNGTWVKMDQHRGFLHNQPRRHAELLFLDLVPSLQLDPAQIYRVTWFISWSPCFSWGCACEVRAFLQENTHVRLRIFAARIADHWPLYKEALQMLRDAGAQVSIMTYDEFKHCWDTFVDHQGAPFQPWDGLDEHSQALSRRLRAILQNQGN

SEQ ID NO: 830 - protein, 192 aa, synthetic construct
MEASPASGPRHLMDPHTFYSNFNNKIGARHKTYLCYEVERLDNGTWVKMDQHRGFLHNQPRRHAELLFLDLVPSLQLDPAQIYRVTWFISWSPCFSWGCACEVRAFLQENTHVRLRIFAARIADHWPLYKEALQMLRDAGAQVSIMTYDEFKHCWDTFVDHQGAPFQPWDGLDEHSQALSRRLRAILQNQGN

SEQ ID NO: 831 - protein, 192 aa, synthetic construct
MEASPASGPRHLMDPHTFYSNFNNKIGRAHKTYLCYEVERLDNGTWVKMDQHRGFLHNQPRRHAELLFLDLVPSLQLDPAQIYRVTWFISWSPCFSWGCACEVRAFLQENTHVRLRIFAARIADHWPLYKEALQMLRDAGAQVSIMTYDEFKHCWDTFVDHQGAPFQPWDGLDEHSQALSRRLRAILQNQGN

SEQ ID NO: 832 - protein, 192 aa, synthetic construct
MEASPASGPRHLMDPHTFYSNFNNKIGRHAKTYLCYEVERLDNGTWVKMDQHRGFLHNQPRRHAELLFLDLVPSLQLDPAQIYRVTWFISWSPCFSWGCACEVRAFLQENTHVRLRIFAARIADHWPLYKEALQMLRDAGAQVSIMTYDEFKHCWDTFVDHQGAPFQPWDGLDEHSQALSRRLRAILQNQGN

SEQ ID NO: 833 - protein, 192 aa, synthetic construct
MEASPASGPRHLMDPHTFYSNFNNKIGRHKATYLCYEVERLDNGTWVKMDQHRGFLHNQPRRHAELLFLDLVPSLQLDPAQIYRVTWFISWSPCFSWGCACEVRAFLQENTHVRLRIFAARIADHWPLYKEALQMLRDAGAQVSIMTYDEFKHCWDTFVDHQGAPFQPWDGLDEHSQALSRRLRAILQNQGN

SEQ ID NO: 834 - protein, 192 aa, synthetic construct
MEASPASGPRHLMDPHTFYSNFNNKIGRHKTAYLCYEVERLDNGTWVKMDQHRGFLHNQPRRHAELLFLDLVPSLQLDPAQIYRVTWFISWSPCFSWGCACEVRAFLQENTHVRLRIFAARIADHWPLYKEALQMLRDAGAQVSIMTYDEFKHCWDTFVDHQGAPFQPWDGLDEHSQALSRRLRAILQNQGN

SEQ ID NO: 835 - protein, 192 aa, synthetic construct
MEASPASGPRHLMDPHTFYSNFNNKIGRHKTYALCYEVERLDNGTWVKMDQHRGFLHNQPRRHAELLFLDLVPSLQLDPAQIYRVTWFISWSPCFSWGCACEVRAFLQENTHVRLRIFAARIADHWPLYKEALQMLRDAGAQVSIMTYDEFKHCWDTFVDHQGAPFQPWDGLDEHSQALSRRLRAILQNQGN

SEQ ID NO: 836 - protein, 192 aa, synthetic construct
MEASPASGPRHLMDPHTFYSNFNNKIGRHKTYLCYEVERLDNGTWVKMDQHRGFLHNQPRRHAELLFLDLVPSLQLDPAQIYRVTWFAISWSPCFSWGCACEVRAFLQENTHVRLRIFAARIADHWPLYKEALQMLRDAGAQVSIMTYDEFKHCWDTFVDHQGAPFQPWDGLDEHSQALSRRLRAILQNQGN

SEQ ID NO: 837 - protein, 192 aa, synthetic construct
MEASPASGPRHLMDPHTFYSNFNNKIGRHKTYLCYEVERLDNGTWVKMDQHRGFLHNQPRRHAELLFLDLVPSLQLDPAQIYRVTWFIASWSPCFSWGCACEVRAFLQENTHVRLRIFAARIADHWPLYKEALQMLRDAGAQVSIMTYDEFKHCWDTFVDHQGAPFQPWDGLDEHSQALSRRLRAILQNQGN

SEQ ID NO: 838 - protein, 192 aa, synthetic construct
MEASPASGPRHLMDPHTFYSNFNNKIGRHKTYLCYEVERLDNGTWVKMDQHRGFLHNQPRRHAELLFLDLVPSLQLDPAQIYRVTWFISAWSPCFSWGCACEVRAFLQENTHVRLRIFAARIADHWPLYKEALQMLRDAGAQVSIMTYDEFKHCWDTFVDHQGAPFQPWDGLDEHSQALSRRLRAILQNQGN

SEQ ID NO: 839 - protein, 192 aa, synthetic construct
MEASPASGPRHLMDPHTFYSNFNNKIGRHKTYLCYEVERLDNGTWVKMDQHRGFLHNQPRRHAELLFLDLVPSLQLDPAQIYRVTWFISWASPCFSWGCACEVRAFLQENTHVRLRIFAARIADHWPLYKEALQMLRDAGAQVSIMTYDEFKHCWDTFVDHQGAPFQPWDGLDEHSQALSRRLRAILQNQGN

SEQ ID NO: 840 - protein, 192 aa, synthetic construct
MEASPASGPRHLMDPHTFYSNFNNKIGRHKTYLCYEVERLDNGTWVKMDQHRGFLHNQPRRHAELLFLDLVPSLQLDPAQIYRVTWFISWSAPCFSWGCACEVRAFLQENTHVRLRIFAARIADHWPLYKEALQMLRDAGAQVSIMTYDEFKHCWDTFVDHQGAPFQPWDGLDEHSQALSRRLRAILQNQGN

SEQ ID NO: 841 - protein, 192 aa, synthetic construct
MEASPASGPRHLMDPHTFYSNFNNKIGRHKTYLCYEVERLDNGTWVKMDQHRGFLHNQPRRHAELLFLDLVPSLQLDPAQIYRVTWFISWSPACFSWGCACEVRAFLQENTHVRLRIFAARIADHWPLYKEALQMLRDAGAQVSIMTYDEFKHCWDTFVDHQGAPFQPWDGLDEHSQALSRRLRAILQNQGN

SEQ ID NO: 842 - protein, 192 aa, synthetic construct
MEASPASGPRHLMDPHTFYSNFNNKIGRHKTYLCYEVERLDNGTWVKMDQHRGFLHNQPRRHAELLFLDLVPSLQLDPAQIYRVTWFISWSPCAFSWGCACEVRAFLQENTHVRLRIFAARIADHWPLYKEALQMLRDAGAQVSIMTYDEFKHCWDTFVDHQGAPFQPWDGLDEHSQALSRRLRAILQNQGN

SEQ ID NO: 843 - protein, 192 aa, synthetic construct
MEASPASGPRHLMDPHTFYSNFNNKIGRHKTYLCYEVERLDNGTWVKMDQHRGFLHNQPRRHAELLFLDLVPSLQLDPAQIYRVTWFISWSPCFASWGCACEVRAFLQENTHVRLRIFAARIADHWPLYKEALQMLRDAGAQVSIMTYDEFKHCWDTFVDHQGAPFQPWDGLDEHSQALSRRLRAILQNQGN

SEQ ID NO: 844 - protein, 192 aa, synthetic construct
MEASPASGPRHLMDPHTFYSNFNNKIGRHKTYLCYEVERLDNGTWVKMDQHRGFLHNQPRRHAELLFLDLVPSLQLDPAQIYRVTWFISWSPCFSAWGCACEVRAFLQENTHVRLRIFAARIADHWPLYKEALQMLRDAGAQVSIMTYDEFKHCWDTFVDHQGAPFQPWDGLDEHSQALSRRLRAILQNQGN

SEQ ID NO: 845 - protein, 192 aa, synthetic construct
MEASPASGPRHLMDPHTFYSNFNNKIGRHKTYLCYEVERLDNGTWVKMDQHRGFLHNQPRRHAELLFLDLVPSLQLDPAQIYRVTWFISWSPCFSWAGCACEVRAFLQENTHVRLRIFAARIADHWPLYKEALQMLRDAGAQVSIMTYDEFKHCWDTFVDHQGAPFQPWDGLDEHSQALSRRLRAILQNQGN

SEQ ID NO: 846 - protein, 192 aa, synthetic construct
MEASPASGPRHLMDPHTFYSNFNNKIGRHKTYLCYEVERLDNGTWVKMDQHRGFLHNQPRRHAELLFLDLVPSLQLDPAQIYRVTWFISWSPCFSWGCACEVRAFLQENTHVRLRIFAAARIADHWPLYKEALQMLRDAGAQVSIMTYDEFKHCWDTFVDHQGAPFQPWDGLDEHSQALSRRLRAILQNQGN

SEQ ID NO: 847 - protein, 192 aa, synthetic construct
MEASPASGPRHLMDPHTFYSNFNNKIGRHKTYLCYEVERLDNGTWVKMDQHRGFLHNQPRRHAELLFLDLVPSLQLDPAQIYRVTWFISWSPCFSWGCACEVRAFLQENTHVRLRIFAARAIADHWPLYKEALQMLRDAGAQVSIMTYDEFKHCWDTFVDHQGAPFQPWDGLDEHSQALSRRLRAILQNQGN

SEQ ID NO: 848 - protein, 192 aa, synthetic construct
MEASPASGPRHLMDPHTFYSNFNNKIGRHKTYLCYEVERLDNGTWVKMDQHRGFLHNQPRRHAELLFLDLVPSLQLDPAQIYRVTWFISWSPCFSWGCACEVRAFLQENTHVRLRIFAARIADHWAPLYKEALQMLRDAGAQVSIMTYDEFKHCWDTFVDHQGAPFQPWDGLDEHSQALSRRLRAILQNQGN

SEQ ID NO: 849 - protein, 192 aa, synthetic construct
MEASPASGPRHLMDPHTFYSNFNNKIGRHKTYLCYEVERLDNGTWVKMDQHRGFLHNQPRRHAELLFLDLVPSLQLDPAQIYRVTWFISWSPCFSWGCACEVRAFLQENTHVRLRIFAARIADHWPLAYKEALQMLRDAGAQVSIMTYDEFKHCWDTFVDHQGAPFQPWDGLDEHSQALSRRLRAILQNQGN

SEQ ID NO: 850 - protein, 192 aa, synthetic construct
MEASPASGPRHLMDPHTFYSNFNNKIGRHKTYLCYEVERLDNGTWVKMDQHRGFLHNQPRRHAELLFLDLVPSLQLDPAQIYRVTWFISWSPCFSWGCACEVRAFLQENTHVRLRIFAARIADHWPLYAKEALQMLRDAGAQVSIMTYDEFKHCWDTFVDHQGAPFQPWDGLDEHSQALSRRLRAILQNQGN

SEQ ID NO: 851 - protein, 192 aa, synthetic construct
MEASPASGPRHLMDPHTFYSNFNNKIGRHKTYLCYEVERLDNGTWVKMDQHRGFLHNQPRRHAELLFLDLVPSLQLDPAQIYRVTWFISWSPCFSWGCACEVRAFLQENTHVRLRIFAARIADHWPLYKAEALQMLRDAGAQVSIMTYDEFKHCWDTFVDHQGAPFQPWDGLDEHSQALSRRLRAILQNQGN

SEQ ID NO: 852 - protein, 192 aa, synthetic construct
MEASPASGPRHLMDPHTFYSNFNNKIGRHKTYLCYEVERLDNGTWVKMDQHRGFLHNQPRRHAELLFLDLVPSLQLDPAQIYRVTWFISWSPCFSWGCACEVRAFLQENTHVRLRIFAARIADHWPLYKEAALQMLRDAGAQVSIMTYDEFKHCWDTFVDHQGAPFQPWDGLDEHSQALSRRLRAILQNQGN

SEQ ID NO: 853 - protein, 191 aa, synthetic construct
MEASPASGPRHLMDPHTFYSNFNNKIGRHKTYLCYEVERLDNGTWVKMDQHRGFLHNQPRRHAELLFLDLVPSLQLDPAQIYRVTWFISWSPCFSCGCACEVRAFLQENTHVRLRIFAARIADHWPLYKEALQMLRDAGAQVSIMTYDEFKHCWDTFVDHQGAPFQPWDGLDEHSQALSRRLRAILQNQGN

SEQ ID NO: 854 - protein, 191 aa, synthetic construct
MEASPASGPRHLMDPHTFYSNFNNKIGRHKTYLCYEVERLDNGTWVKMDQHRGFLHNQPRRHAELLFLDLVPSLQLDPAQIYRVTWFISWSPAFSCGCACEVRAFLQENTHVRLRIFAARIADHWPLYKEALQMLRDAGAQVSIMTYDEFKHCWDTFVDHQGAPFQPWDGLDEHSQALSRRLRAILQNQGN

SEQ ID NO: 855 - protein, 191 aa, synthetic construct
MEASPASGPRHLMDPHTFYSNFNNKIGRHKTYLCYEVERLDNGTWVKMDQHRGFLHNQPRRHAELLFLDLVPSLQLDPAQIYRVTWFISWSPGFSCGCACEVRAFLQENTHVRLRIFAARIADHWPLYKEALQMLRDAGAQVSIMTYDEFKHCWDTFVDHQGAPFQPWDGLDEHSQALSRRLRAILQNQGN

SEQ ID NO: 856 - protein, 191 aa, synthetic construct
MEASPASGPRHLMDPHTFYSNFNNKIGRHKTYLCYEVERLDNGTWVKMDQHRGFLHNQPRRHAELLFLDLVPSLQLDPAQIYRVTWFISWSPCFSCGAACEVRAFLQENTHVRLRIFAARIADHWPLYKEALQMLRDAGAQVSIMTYDEFKHCWDTFVDHQGAPFQPWDGLDEHSQALSRRLRAILQNQGN

SEQ ID NO: 857 - protein, 191 aa, synthetic construct
MEASPASGPRHLMDPHTFYSNFNNKIGRHKTYLCYEVERLDNGTWVKMDQHRGFLHNQPRRHAELLFLDLVPSLQLDPAQIYRVTWFISWSPLFSCGCACEVRAFLQENTHVRLRIFAARIADHWPLYKEALQMLRDAGAQVSIMTYDEFKHCWDTFVDHQGAPFQPWDGLDEHSQALSRRLRAILQNQGN

SEQ ID NO: 858 - protein, 191 aa, synthetic construct
MEASPASGPRHLMDPHTFYSNFNNKIGRHKTYLCYEVERLDNGTWVKMDQHRGFLHNQPRRHAELLFLDLVPSLQLDPAQIYRVTWFISWSPSFSCGCACEVRAFLQENTHVRLRIFAARIADHWPLYKEALQMLRDAGAQVSIMTYDEFKHCWDTFVDHQGAPFQPWDGLDEHSQALSRRLRAILQNQGN

SEQ ID NO: 859 - protein, 189 aa, synthetic construct
MEASPASGPRHLMDPHTFYSNFNNKIGRHKTYLCYEVERLDNGTWVKMDQHRGFLHNQPRRHAELLFLDLVPSLQLDPAQIYRVTWFISWSPCFSCACEVRAFLQENTHVRLRIFCARIADHWPLYKEALQMLRDAGAQVSIMTYDEFKHCWDTFVDHQGAPFQPWDGLDEHSQALSRRLRAILQNQGN

SEQ ID NO: 860 - protein, 189 aa, synthetic construct
MEASPASGPRHLMDPHTFYSNFNNKIGRHKTYLCYEVERLDNGTWVKMDQHRGFLHNQPGRHAELLFLDLVPSLQLDPAQIYRVTWFISWSPCFSCACEVRAFLQENTHVRLRIFCARIADHWPLYKEALQMLRDAGAQVSIMTYDEFKHCWDTFVDHQGAPFQPWDGLDEHSQALSRRLRAILQNQGN

SEQ ID NO: 861 - protein, 191 aa, synthetic construct
MEASPASGPRHLMDPHTFYSNFNNKIGRHKTYLCYEVERLDNGTWVKMDQHRGFLHNQPRRHAELLFLDLVPSLQLDPAQIYRVTWFISWSPCFAWGCACEVRAFLQENTHVRLRIFAARIADHWPLYKEALQMLRDAGAQVSIMTYDEFKHCWDTFVDHQGAPFQPWDGLDEHSQALSRRLRAILQNQGN

SEQ ID NO: 862-863 - skipped (2 entries)

SEQ ID NO: 864 - protein, 191 aa, synthetic construct
MEASPASGPRHLMDPHTFYSNFNNKIGRHKTYLCYEVERLDNGTWVKMDQHRGFLHNQPRRHAELLFLDLVPSLQLDPAQIYRVTWFISWSPCFEWGCACEVRAFLQENTHVRLRIFAARIADHWPLYKEALQMLRDAGAQVSIMTYDEFKHCWDTFVDHQGAPFQPWDGLDEHSQALSRRLRAILQNQGN

SEQ ID NO: 865 - skipped

SEQ ID NO: 866 - protein, 191 aa, synthetic construct
MEASPASGPRHLMDPHTFYSNFNNKIGRHKTYLCYEVERLDNGTWVKMDQHRGFLHNQPRRHAELLFLDLVPSLQLDPAQIYRVTWFISWSPCFGWGCACEVRAFLQENTHVRLRIFAARIADHWPLYKEALQMLRDAGAQVSIMTYDEFKHCWDTFVDHQGAPFQPWDGLDEHSQALSRRLRAILQNQGN

SEQ ID NO: 867-871 - skipped (5 entries)

SEQ ID NO: 872 - protein, 191 aa, synthetic construct
MEASPASGPRHLMDPHTFYSNFNNKIGRHKTYLCYEVERLDNGTWVKMDQHRGFLHNQPRRHAELLFLDLVPSLQLDPAQIYRVTWFISWSPCFNWGCACEVRAFLQENTHVRLRIFAARIADHWPLYKEALQMLRDAGAQVSIMTYDEFKHCWDTFVDHQGAPFQPWDGLDEHSQALSRRLRAILQNQGN

SEQ ID NO: 873 - protein, 191 aa, synthetic construct
MEASPASGPRHLMDPHTFYSNFNNKIGRHKTYLCYEVERLDNGTWVKMDQHRGFLHNQPRRHAELLFLDLVPSLQLDPAQIYRVTWFISWSPCFPWGCACEVRAFLQENTHVRLRIFAARIADHWPLYKEALQMLRDAGAQVSIMTYDEFKHCWDTFVDHQGAPFQPWDGLDEHSQALSRRLRAILQNQGN

SEQ ID NO: 874-876 - skipped (3 entries)

SEQ ID NO: 877 - protein, 191 aa, synthetic construct
MEASPASGPRHLMDPHTFYSNFNNKIGRHKTYLCYEVERLDNGTWVKMDQHRGFLHNQPRRHAELLFLDLVPSLQLDPAQIYRVTWFISWSPCFVWGCACEVRAFLQENTHVRLRIFAARIADHWPLYKEALQMLRDAGAQVSIMTYDEFKHCWDTFVDHQGAPFQPWDGLDEHSQALSRRLRAILQNQGN

SEQ ID NO: 878-879 - skipped (2 entries)

SEQ ID NO: 880 - protein, 190 aa, synthetic construct
MEASPASGPRHLMDPHTFYSNFNNKIGRHKTYLCYEVERLDNGTWVKMDQHRGFLHNQPRRHAELLFLDLVPSLQLDPAQIYRVTWFISWSPCFWGCACEVRAFLQENTHVRLRIFAARIADHWPLYKEALQMLRDAGAQVSIMTYDEFKHCWDTFVDHQGAPFQPWDGLDEHSQALSRRLRAILQNQGN

SEQ ID NO: 881 - protein, 189 aa, synthetic construct
MEASPASGPRHLMDPHTFYSNFNNKIGRHKTYLCYEVERLDNGTWVKMDQHRGFLHNQPRRHAELLFLDLVPSLQLDPAQIYRVTWFISWSPCFACACEVRAFLQENTHVRLRIFAARIADHWPLYKEALQMLRDAGAQVSIMTYDEFKHCWDTFVDHQGAPFQPWDGLDEHSQALSRRLRAILQNQGN

SEQ ID NO: 882 - protein, 189 aa, synthetic construct
MEASPASGPRHLMDPHTFYSNFNNKIGRHKTYLCYEVERLDNGTWVKMDQHRGFLHNQPRRHAELLFLDLVPSLQLDPAQIYRVTWFISWSPCFCCACEVRAFLQENTHVRLRIFAARIADHWPLYKEALQMLRDAGAQVSIMTYDEFKHCWDTFVDHQGAPFQPWDGLDEHSQALSRRLRAILQNQGN

SEQ ID NO: 883 - protein, 189 aa, synthetic construct
MEASPASGPRHLMDPHTFYSNFNNKIGRHKTYLCYEVERLDNGTWVKMDQHRGFLHNQPRRHAELLFLDLVPSLQLDPAQIYRVTWFISWSPCFDCACEVRAFLQENTHVRLRIFAARIADHWPLYKEALQMLRDAGAQVSIMTYDEFKHCWDTFVDHQGAPFQPWDGLDEHSQALSRRLRAILQNQGN

SEQ ID NO: 884 - protein, 189 aa, synthetic construct
MEASPASGPRHLMDPHTFYSNFNNKIGRHKTYLCYEVERLDNGTWVKMDQHRGFLHNQPRRHAELLFLDLVPSLQLDPAQIYRVTWFISWSPCFECACEVRAFLQENTHVRLRIFAARIADHWPLYKEALQMLRDAGAQVSIMTYDEFKHCWDTFVDHQGAPFQPWDGLDEHSQALSRRLRAILQNQGN

SEQ ID NO: 885 - protein, 189 aa, synthetic construct
MEASPASGPRHLMDPHTFYSNFNNKIGRHKTYLCYEVERLDNGTWVKMDQHRGFLHNQPRRHAELLFLDLVPSLQLDPAQIYRVTWFISWSPCFFCACEVRAFLQENTHVRLRIFAARIADHWPLYKEALQMLRDAGAQVSIMTYDEFKHCWDTFVDHQGAPFQPWDGLDEHSQALSRRLRAILQNQGN

SEQ ID NO: 886 - protein, 189 aa, synthetic construct
MEASPASGPRHLMDPHTFYSNFNNKIGRHKTYLCYEVERLDNGTWVKMDQHRGFLHNQPRRHAELLFLDLVPSLQLDPAQIYRVTWFISWSPCFGCACEVRAFLQENTHVRLRIFAARIADHWPLYKEALQMLRDAGAQVSIMTYDEFKHCWDTFVDHQGAPFQPWDGLDEHSQALSRRLRAILQNQGN

SEQ ID NO: 887 - protein, 189 aa, synthetic construct
MEASPASGPRHLMDPHTFYSNFNNKIGRHKTYLCYEVERLDNGTWVKMDQHRGFLHNQPRRHAELLFLDLVPSLQLDPAQIYRVTWFISWSPCFHCACEVRAFLQENTHVRLRIFAARIADHWPLYKEALQMLRDAGAQVSIMTYDEFKHCWDTFVDHQGAPFQPWDGLDEHSQALSRRLRAILQNQGN

SEQ ID NO: 888 - protein, 189 aa, synthetic construct
MEASPASGPRHLMDPHTFYSNFNNKIGRHKTYLCYEVERLDNGTWVKMDQHRGFLHNQPRRHAELLFLDLVPSLQLDPAQIYRVTWFISWSPCFICACEVRAFLQENTHVRLRIFAARIADHWPLYKEALQMLRDAGAQVSIMTYDEFKHCWDTFVDHQGAPFQPWDGLDEHSQALSRRLRAILQNQGN

SEQ ID NO: 889 - protein, 189 aa, synthetic construct
MEASPASGPRHLMDPHTFYSNFNNKIGRHKTYLCYEVERLDNGTWVKMDQHRGFLHNQPRRHAELLFLDLVPSLQLDPAQIYRVTWFISWSPCFKCACEVRAFLQENTHVRLRIFAARIADHWPLYKEALQMLRDAGAQVSIMTYDEFKHCWDTFVDHQGAPFQPWDGLDEHSQALSRRLRAILQNQGN

SEQ ID NO: 890 - protein, 189 aa, synthetic construct
MEASPASGPRHLMDPHTFYSNFNNKIGRHKTYLCYEVERLDNGTWVKMDQHRGFLHNQPRRHAELLFLDLVPSLQLDPAQIYRVTWFISWSPCFLCACEVRAFLQENTHVRLRIFAARIADHWPLYKEALQMLRDAGAQVSIMTYDEFKHCWDTFVDHQGAPFQPWDGLDEHSQALSRRLRAILQNQGN

SEQ ID NO: 891 - protein, 189 aa, synthetic construct
MEASPASGPRHLMDPHTFYSNFNNKIGRHKTYLCYEVERLDNGTWVKMDQHRGFLHNQPRRHAELLFLDLVPSLQLDPAQIYRVTWFISWSPCFMCACEVRAFLQENTHVRLRIFAARIADHWPLYKEALQMLRDAGAQVSIMTYDEFKHCWDTFVDHQGAPFQPWDGLDEHSQALSRRLRAILQNQGN

SEQ ID NO: 892 - protein, 189 aa, synthetic construct
MEASPASGPRHLMDPHTFYSNFNNKIGRHKTYLCYEVERLDNGTWVKMDQHRGFLHNQPRRHAELLFLDLVPSLQLDPAQIYRVTWFISWSPCFNCACEVRAFLQENTHVRLRIFAARIADHWPLYKEALQMLRDAGAQVSIMTYDEFKHCWDTFVDHQGAPFQPWDGLDEHSQALSRRLRAILQNQGN

SEQ ID NO: 893 - protein, 189 aa, synthetic construct
MEASPASGPRHLMDPHTFYSNFNNKIGRHKTYLCYEVERLDNGTWVKMDQHRGFLHNQPRRHAELLFLDLVPSLQLDPAQIYRVTWFISWSPCFPCACEVRAFLQENTHVRLRIFAARIADHWPLYKEALQMLRDAGAQVSIMTYDEFKHCWDTFVDHQGAPFQPWDGLDEHSQALSRRLRAILQNQGN

SEQ ID NO: 894 - protein, 189 aa, synthetic construct
MEASPASGPRHLMDPHTFYSNFNNKIGRHKTYLCYEVERLDNGTWVKMDQHRGFLHNQPRRHAELLFLDLVPSLQLDPAQIYRVTWFISWSPCFQCACEVRAFLQENTHVRLRIFAARIADHWPLYKEALQMLRDAGAQVSIMTYDEFKHCWDTFVDHQGAPFQPWDGLDEHSQALSRRLRAILQNQGN

SEQ ID NO: 895 - protein, 189 aa, synthetic construct
MEASPASGPRHLMDPHTFYSNFNNKIGRHKTYLCYEVERLDNGTWVKMDQHRGFLHNQPRRHAELLFLDLVPSLQLDPAQIYRVTWFISWSPCFRCACEVRAFLQENTHVRLRIFAARIADHWPLYKEALQMLRDAGAQVSIMTYDEFKHCWDTFVDHQGAPFQPWDGLDEHSQALSRRLRAILQNQGN

SEQ ID NO: 896 - protein, 189 aa, synthetic construct
MEASPASGPRHLMDPHTFYSNFNNKIGRHKTYLCYEVERLDNGTWVKMDQHRGFLHNQPRRHAELLFLDLVPSLQLDPAQIYRVTWFISWSPCFTCACEVRAFLQENTHVRLRIFAARIADHWPLYKEALQMLRDAGAQVSIMTYDEFKHCWDTFVDHQGAPFQPWDGLDEHSQALSRRLRAILQNQGN

SEQ ID NO: 897 - protein, 189 aa, synthetic construct
MEASPASGPRHLMDPHTFYSNFNNKIGRHKTYLCYEVERLDNGTWVKMDQHRGFLHNQPRRHAELLFLDLVPSLQLDPAQIYRVTWFISWSPCFVCACEVRAFLQENTHVRLRIFAARIADHWPLYKEALQMLRDAGAQVSIMTYDEFKHCWDTFVDHQGAPFQPWDGLDEHSQALSRRLRAILQNQGN

SEQ ID NO: 898 - protein, 189 aa, synthetic construct
MEASPASGPRHLMDPHTFYSNFNNKIGRHKTYLCYEVERLDNGTWVKMDQHRGFLHNQPRRHAELLFLDLVPSLQLDPAQIYRVTWFISWSPCFWCACEVRAFLQENTHVRLRIFAARIADHWPLYKEALQMLRDAGAQVSIMTYDEFKHCWDTFVDHQGAPFQPWDGLDEHSQALSRRLRAILQNQGN

SEQ ID NO: 899 - protein, 189 aa, synthetic construct
MEASPASGPRHLMDPHTFYSNFNNKIGRHKTYLCYEVERLDNGTWVKMDQHRGFLHNQPRRHAELLFLDLVPSLQLDPAQIYRVTWFISWSPCFYCACEVRAFLQENTHVRLRIFAARIADHWPLYKEALQMLRDAGAQVSIMTYDEFKHCWDTFVDHQGAPFQPWDGLDEHSQALSRRLRAILQNQGN

SEQ ID NO: 900 - protein, 188 aa, synthetic construct
MEASPASGPRHLMDPHTFYSNFNNKIGRHKTYLCYEVERLDNGTWVKMDQHRGFLHNQPRRHAELLFLDLVPSLQLDPAQIYRVTWFISWSPCFCACEVRAFLQENTHVRLRIFAARIADHWPLYKEALQMLRDAGAQVSIMTYDEFKHCWDTFVDHQGAPFQPWDGLDEHSQALSRRLRAILQNQGN

SEQ ID NO: 901 - skipped

SEQ ID NO: 902 - protein, 191 aa, synthetic construct
MEASPASGPRHLMDPHTFYSNFNNKIGRHKTYLCYEVERLDNGTWVKMDQHRGFLHNQPRRHAELLFLDLVPSLQLDPAQIYRVTWFISWSPCFSWGCACEVRAFLQENTHVRLRIFAARIADHWPLYKCALQMLRDAGAQVSIMTYDEFKHCWDTFVDHQGAPFQPWDGLDEHSQALSRRLRAILQNQGN

SEQ ID NO: 903 - protein, 191 aa, synthetic construct
MEASPASGPRHLMDPHTFYSNFNNKIGRHKTYLCYEVERLDNGTWVKMDQHRGFLHNQPRRHAELLFLDLVPSLQLDPAQIYRVTWFISWSPCFSWGCACEVRAFLQENTHVRLRIFAARIADHWPLYKDALQMLRDAGAQVSIMTYDEFKHCWDTFVDHQGAPFQPWDGLDEHSQALSRRLRAILQNQGN

SEQ ID NO: 904 - skipped

SEQ ID NO: 905 - protein, 191 aa, synthetic construct
MEASPASGPRHLMDPHTFYSNFNNKIGRHKTYLCYEVERLDNGTWVKMDQHRGFLHNQPRRHAELLFLDLVPSLQLDPAQIYRVTWFISWSPCFSWGCACEVRAFLQENTHVRLRIFAARIADHWPLYKGALQMLRDAGAQVSIMTYDEFKHCWDTFVDHQGAPFQPWDGLDEHSQALSRRLRAILQNQGN

SEQ ID NO: 906 - protein, 191 aa, synthetic construct
MEASPASGPRHLMDPHTFYSNFNNKIGRHKTYLCYEVERLDNGTWVKMDQHRGFLHNQPRRHAELLFLDLVPSLQLDPAQIYRVTWFISWSPCFSWGCACEVRAFLQENTHVRLRIFAARIADHWPLYKHALQMLRDAGAQVSIMTYDEFKHCWDTFVDHQGAPFQPWDGLDEHSQALSRRLRAILQNQGN

SEQ ID NO: 907 - skipped

SEQ ID NO: 908 - protein, 191 aa, synthetic construct
MEASPASGPRHLMDPHTFYSNFNNKIGRHKTYLCYEVERLDNGTWVKMDQHRGFLHNQPRRHAELLFLDLVPSLQLDPAQIYRVTWFISWSPCFSWGCACEVRAFLQENTHVRLRIFAARIADHWPLYKKALQMLRDAGAQVSIMTYDEFKHCWDTFVDHQGAPFQPWDGLDEHSQALSRRLRAILQNQGN

SEQ ID NO: 909-910 - skipped (2 entries)

SEQ ID NO: 911 - protein, 191 aa, synthetic construct
MEASPASGPRHLMDPHTFYSNFNNKIGRHKTYLCYEVERLDNGTWVKMDQHRGFLHNQPRRHAELLFLDLVPSLQLDPAQIYRVTWFISWSPCFSWGCACEVRAFLQENTHVRLRIFAARIADHWPLYKNALQMLRDAGAQVSIMTYDEFKHCWDTFVDHQGAPFQPWDGLDEHSQALSRRLRAILQNQGN

SEQ ID NO: 912-914 - skipped (3 entries)

SEQ ID NO: 915 - protein, 191 aa, synthetic construct
MEASPASGPRHLMDPHTFYSNFNNKIGRHKTYLCYEVERLDNGTWVKMDQHRGFLHNQPRRHAELLFLDLVPSLQLDPAQIYRVTWFISWSPCFSWGCACEVRAFLQENTHVRLRIFAARIADHWPLYKSALQMLRDAGAQVSIMTYDEFKHCWDTFVDHQGAPFQPWDGLDEHSQALSRRLRAILQNQGN

SEQ ID NO: 916 - protein, 191 aa, synthetic construct
MEASPASGPRHLMDPHTFYSNFNNKIGRHKTYLCYEVERLDNGTWVKMDQHRGFLHNQPRRHAELLFLDLVPSLQLDPAQIYRVTWFISWSPCFSWGCACEVRAFLQENTHVRLRIFAARIADHWPLYKTALQMLRDAGAQVSIMTYDEFKHCWDTFVDHQGAPFQPWDGLDEHSQALSRRLRAILQNQGN

SEQ ID NO: 917 - protein, 191 aa, synthetic construct
MEASPASGPRHLMDPHTFYSNFNNKIGRHKTYLCYEVERLDNGTWVKMDQHRGFLHNQPRRHAELLFLDLVPSLQLDPAQIYRVTWFISWSPCFSWGCACEVRAFLQENTHVRLRIFAARIADHWPLYKVALQMLRDAGAQVSIMTYDEFKHCWDTFVDHQGAPFQPWDGLDEHSQALSRRLRAILQNQGN

SEQ ID NO: 918 - skipped

SEQ ID NO: 919 - protein, 191 aa, synthetic construct
MEASPASGPRHLMDPHTFYSNFNNKIGRHKTYLCYEVERLDNGTWVKMDQHRGFLHNQPRRHAELLFLDLVPSLQLDPAQIYRVTWFISWSPCFSWGCACEVRAFLQENTHVRLRIFAARIADHWPLYKYALQMLRDAGAQVSIMTYDEFKHCWDTFVDHQGAPFQPWDGLDEHSQALSRRLRAILQNQGN

SEQ ID NO: 920 - protein, 190 aa, synthetic construct
MEASPASGPRHLMDPHTFYSNFNNKIGRHKTYLCYEVERLDNGTWVKMDQHRGFLHNQPRRHAELLFLDLVPSLQLDPAQIYRVTWFISWSPCFSWGCACEVRAFLQENTHVRLRIFAARIADHWPLYKALQMLRDAGAQVSIMTYDEFKHCWDTFVDHQGAPFQPWDGLDEHSQALSRRLRAILQNQGN

SEQ ID NO: 921 - protein, 191 aa, synthetic construct
MEASPASGPRHLMDPHTFYSNFNNKIGRHKTYLCYEVERLDNGTWVKMDQHRGFLHNQPRRHAELLFLDLVPSLQLDPAQIYRVTWFISWSPCFSWACACEVRAFLQENTHVRLRIFAARIADHWPLYKEALQMLRDAGAQVSIMTYDEFKHCWDTFVDHQGAPFQPWDGLDEHSQALSRRLRAILQNQGN

SEQ ID NO: 922 - protein, 191 aa, synthetic construct
MEASPASGPRHLMDPHTFYSNFNNKIGRHKTYLCYEVERLDNGTWVKMDQHRGFLHNQPRRHAELLFLDLVPSLQLDPAQIYRVTWFISWSPCFSWCCACEVRAFLQENTHVRLRIFAARIADHWPLYKEALQMLRDAGAQVSIMTYDEFKHCWDTFVDHQGAPFQPWDGLDEHSQALSRRLRAILQNQGN

SEQ ID NO: 923 - protein, 191 aa, synthetic construct
MEASPASGPRHLMDPHTFYSNFNNKIGRHKTYLCYEVERLDNGTWVKMDQHRGFLHNQPRRHAELLFLDLVPSLQLDPAQIYRVTWFISWSPCFSWDCACEVRAFLQENTHVRLRIFAARIADHWPLYKEALQMLRDAGAQVSIMTYDEFKHCWDTFVDHQGAPFQPWDGLDEHSQALSRRLRAILQNQGN

SEQ ID NO: 924 - protein, 191 aa, synthetic construct
MEASPASGPRHLMDPHTFYSNFNNKIGRHKTYLCYEVERLDNGTWVKMDQHRGFLHNQPRRHAELLFLDLVPSLQLDPAQIYRVTWFISWSPCFSWECACEVRAFLQENTHVRLRIFAARIADHWPLYKEALQMLRDAGAQVSIMTYDEFKHCWDTFVDHQGAPFQPWDGLDEHSQALSRRLRAILQNQGN

SEQ ID NO: 925 - protein, 191 aa, synthetic construct
MEASPASGPRHLMDPHTFYSNFNNKIGRHKTYLCYEVERLDNGTWVKMDQHRGFLHNQPRRHAELLFLDLVPSLQLDPAQIYRVTWFISWSPCFSWFCACEVRAFLQENTHVRLRIFAARIADHWPLYKEALQMLRDAGAQVSIMTYDEFKHCWDTFVDHQGAPFQPWDGLDEHSQALSRRLRAILQNQGN

SEQ ID NO: 926 - protein, 191 aa, synthetic construct
MEASPASGPRHLMDPHTFYSNFNNKIGRHKTYLCYEVERLDNGTWVKMDQHRGFLHNQPRRHAELLFLDLVPSLQLDPAQIYRVTWFISWSPCFSWHCACEVRAFLQENTHVRLRIFAARIADHWPLYKEALQMLRDAGAQVSIMTYDEFKHCWDTFVDHQGAPFQPWDGLDEHSQALSRRLRAILQNQGN

SEQ ID NO: 927 - protein, 191 aa, synthetic construct
MEASPASGPRHLMDPHTFYSNFNNKIGRHKTYLCYEVERLDNGTWVKMDQHRGFLHNQPRRHAELLFLDLVPSLQLDPAQIYRVTWFISWSPCFSWICACEVRAFLQENTHVRLRIFAARIADHWPLYKEALQMLRDAGAQVSIMTYDEFKHCWDTFVDHQGAPFQPWDGLDEHSQALSRRLRAILQNQGN

SEQ ID NO: 928 - skipped

SEQ ID NO: 929 - protein, 191 aa, synthetic construct
MEASPASGPRHLMDPHTFYSNFNNKIGRHKTYLCYEVERLDNGTWVKMDQHRGFLHNQPRRHAELLFLDLVPSLQLDPAQIYRVTWFISWSPCFSWLCACEVRAFLQENTHVRLRIFAARIADHWPLYKEALQMLRDAGAQVSIMTYDEFKHCWDTFVDHQGAPFQPWDGLDEHSQALSRRLRAILQNQGN

SEQ ID NO: 930 - protein, 191 aa, synthetic construct
MEASPASGPRHLMDPHTFYSNFNNKIGRHKTYLCYEVERLDNGTWVKMDQHRGFLHNQPRRHAELLFLDLVPSLQLDPAQIYRVTWFISWSPCFSWMCACEVRAFLQENTHVRLRIFAARIADHWPLYKEALQMLRDAGAQVSIMTYDEFKHCWDTFVDHQGAPFQPWDGLDEHSQALSRRLRAILQNQGN

SEQ ID NO: 931 - skipped

SEQ ID NO: 932 - protein, 191 aa, synthetic construct
MEASPASGPRHLMDPHTFYSNFNNKIGRHKTYLCYEVERLDNGTWVKMDQHRGFLHNQPRRHAELLFLDLVPSLQLDPAQIYRVTWFISWSPCFSWPCACEVRAFLQENTHVRLRIFAARIADHWPLYKEALQMLRDAGAQVSIMTYDEFKHCWDTFVDHQGAPFQPWDGLDEHSQALSRRLRAILQNQGN

SEQ ID NO: 933 - protein, 191 aa, synthetic construct
MEASPASGPRHLMDPHTFYSNFNNKIGRHKTYLCYEVERLDNGTWVKMDQHRGFLHNQPRRHAELLFLDLVPSLQLDPAQIYRVTWFISWSPCFSWQCACEVRAFLQENTHVRLRIFAARIADHWPLYKEALQMLRDAGAQVSIMTYDEFKHCWDTFVDHQGAPFQPWDGLDEHSQALSRRLRAILQNQGN

SEQ ID NO: 934 - protein, 191 aa, synthetic construct
MEASPASGPRHLMDPHTFYSNFNNKIGRHKTYLCYEVERLDNGTWVKMDQHRGFLHNQPRRHAELLFLDLVPSLQLDPAQIYRVTWFISWSPCFSWRCACEVRAFLQENTHVRLRIFAARIADHWPLYKEALQMLRDAGAQVSIMTYDEFKHCWDTFVDHQGAPFQPWDGLDEHSQALSRRLRAILQNQGN

SEQ ID NO: 935 - protein, 191 aa, synthetic construct
MEASPASGPRHLMDPHTFYSNFNNKIGRHKTYLCYEVERLDNGTWVKMDQHRGFLHNQPRRHAELLFLDLVPSLQLDPAQIYRVTWFISWSPCFSWSCACEVRAFLQENTHVRLRIFAARIADHWPLYKEALQMLRDAGAQVSIMTYDEFKHCWDTFVDHQGAPFQPWDGLDEHSQALSRRLRAILQNQGN

SEQ ID NO: 936 - protein, 191 aa, synthetic construct
MEASPASGPRHLMDPHTFYSNFNNKIGRHKTYLCYEVERLDNGTWVKMDQHRGFLHNQPRRHAELLFLDLVPSLQLDPAQIYRVTWFISWSPCFSWTCACEVRAFLQENTHVRLRIFAARIADHWPLYKEALQMLRDAGAQVSIMTYDEFKHCWDTFVDHQGAPFQPWDGLDEHSQALSRRLRAILQNQGN

SEQ ID NO: 937 - protein, 191 aa, synthetic construct
MEASPASGPRHLMDPHTFYSNFNNKIGRHKTYLCYEVERLDNGTWVKMDQHRGFLHNQPRRHAELLFLDLVPSLQLDPAQIYRVTWFISWSPCFSWVCACEVRAFLQENTHVRLRIFAARIADHWPLYKEALQMLRDAGAQVSIMTYDEFKHCWDTFVDHQGAPFQPWDGLDEHSQALSRRLRAILQNQGN

SEQ ID NO: 938-939 - skipped (2 entries)

SEQ ID NO: 940 - protein, 190 aa, synthetic construct
MEASPASGPRHLMDPHTFYSNFNNKIGRHKTYLCYEVERLDNGTWVKMDQHRGFLHNQPRRHAELLFLDLVPSLQLDPAQIYRVTWFISWSPCFSWCACEVRAFLQENTHVRLRIFAARIADHWPLYKEALQMLRDAGAQVSIMTYDEFKHCWDTFVDHQGAPFQPWDGLDEHSQALSRRLRAILQNQGN

SEQ ID NO: 941 - protein, 189 aa, synthetic construct
MEASPASGPRHLMDPHTFYSNFNNGRHKTYLCYEVERLDNGTWVKMDQHRGFLHNQPRRHAELLFLDLVPSLQLDPAQIYRVTWFISWSPCFSWGCACEVRAFLQENTHVRLRIFAARIADHWPLYKEALQMLRDAGAQVSIMTYDEFKHCWDTFVDHQGAPFQPWDGLDEHSQALSRRLRAILQNQGN

SEQ ID NO: 942 - skipped

SEQ ID NO: 943 - protein, 189 aa, synthetic construct
MEASPASGPRHLMDPHTFYSNFNNKIHKTYLCYEVERLDNGTWVKMDQHRGFLHNQPRRHAELLFLDLVPSLQLDPAQIYRVTWFISWSPCFSWGCACEVRAFLQENTHVRLRIFAARIADHWPLYKEALQMLRDAGAQVSIMTYDEFKHCWDTFVDHQGAPFQPWDGLDEHSQALSRRLRAILQNQGN

SEQ ID NO: 944 - protein, 189 aa, synthetic construct
MEASPASGPRHLMDPHTFYSNFNNKIGKTYLCYEVERLDNGTWVKMDQHRGFLHNQPRRHAELLFLDLVPSLQLDPAQIYRVTWFISWSPCFSWGCACEVRAFLQENTHVRLRIFAARIADHWPLYKEALQMLRDAGAQVSIMTYDEFKHCWDTFVDHQGAPFQPWDGLDEHSQALSRRLRAILQNQGN

SEQ ID NO: 945 - protein, 189 aa, synthetic construct
MEASPASGPRHLMDPHTFYSNFNNKIGRTYLCYEVERLDNGTWVKMDQHRGFLHNQPRRHAELLFLDLVPSLQLDPAQIYRVTWFISWSPCFSWGCACEVRAFLQENTHVRLRIFAARIADHWPLYKEALQMLRDAGAQVSIMTYDEFKHCWDTFVDHQGAPFQPWDGLDEHSQALSRRLRAILQNQGN

SEQ ID NO: 946 - protein, 189 aa, synthetic construct
MEASPASGPRHLMDPHTFYSNFNNKIGRHYLCYEVERLDNGTWVKMDQHRGFLHNQPRRHAELLFLDLVPSLQLDPAQIYRVTWFISWSPCFSWGCACEVRAFLQENTHVRLRIFAARIADHWPLYKEALQMLRDAGAQVSIMTYDEFKHCWDTFVDHQGAPFQPWDGLDEHSQALSRRLRAILQNQGN

SEQ ID NO: 947 - protein, 189 aa, synthetic construct
MEASPASGPRHLMDPHTFYSNFNNKIGRHKLCYEVERLDNGTWVKMDQHRGFLHNQPRRHAELLFLDLVPSLQLDPAQIYRVTWFISWSPCFSWGCACEVRAFLQENTHVRLRIFAARIADHWPLYKEALQMLRDAGAQVSIMTYDEFKHCWDTFVDHQGAPFQPWDGLDEHSQALSRRLRAILQNQGN

SEQ ID NO: 948 - protein, 189 aa, synthetic construct
MEASPASGPRHLMDPHTFYSNFNNKIGRHKTCYEVERLDNGTWVKMDQHRGFLHNQPRRHAELLFLDLVPSLQLDPAQIYRVTWFISWSPCFSWGCACEVRAFLQENTHVRLRIFAARIADHWPLYKEALQMLRDAGAQVSIMTYDEFKHCWDTFVDHQGAPFQPWDGLDEHSQALSRRLRAILQNQGN

SEQ ID NO: 949 - protein, 187 aa, synthetic construct
MEASPASGPRHLMDPHTFYSNFNNGRHKTYLCYEVERLDNGTWVKMDQHRGFLHNQPRRHAELLFLDLVPSLQLDPAQIYRVTWFISWSPCFSCACEVRAFLQENTHVRLRIFAARIADHWPLYKEALQMLRDAGAQVSIMTYDEFKHCWDTFVDHQGAPFQPWDGLDEHSQALSRRLRAILQNQGN

SEQ ID NO: 950 - protein, 187 aa, synthetic construct
MEASPASGPRHLMDPHTFYSNFNNKRHKTYLCYEVERLDNGTWVKMDQHRGFLHNQPRRHAELLFLDLVPSLQLDPAQIYRVTWFISWSPCFSCACEVRAFLQENTHVRLRIFAARIADHWPLYKEALQMLRDAGAQVSIMTYDEFKHCWDTFVDHQGAPFQPWDGLDEHSQALSRRLRAILQNQGN

SEQ ID NO: 951 - protein, 187 aa, synthetic construct
MEASPASGPRHLMDPHTFYSNFNNKIHKTYLCYEVERLDNGTWVKMDQHRGFLHNQPRRHAELLFLDLVPSLQLDPAQIYRVTWFISWSPCFSCACEVRAFLQENTHVRLRIFAARIADHWPLYKEALQMLRDAGAQVSIMTYDEFKHCWDTFVDHQGAPFQPWDGLDEHSQALSRRLRAILQNQGN

SEQ ID NO: 952 - protein, 187 aa, synthetic construct
MEASPASGPRHLMDPHTFYSNFNNKIGKTYLCYEVERLDNGTWVKMDQHRGFLHNQPRRHAELLFLDLVPSLQLDPAQIYRVTWFISWSPCFSCACEVRAFLQENTHVRLRIFAARIADHWPLYKEALQMLRDAGAQVSIMTYDEFKHCWDTFVDHQGAPFQPWDGLDEHSQALSRRLRAILQNQGN

SEQ ID NO: 953 - protein, 187 aa, synthetic construct
MEASPASGPRHLMDPHTFYSNFNNKIGRTYLCYEVERLDNGTWVKMDQHRGFLHNQPRRHAELLFLDLVPSLQLDPAQIYRVTWFISWSPCFSCACEVRAFLQENTHVRLRIFAARIADHWPLYKEALQMLRDAGAQVSIMTYDEFKHCWDTFVDHQGAPFQPWDGLDEHSQALSRRLRAILQNQGN

SEQ ID NO: 954 - protein, 187 aa, synthetic construct
MEASPASGPRHLMDPHTFYSNFNNKIGRHYLCYEVERLDNGTWVKMDQHRGFLHNQPRRHAELLFLDLVPSLQLDPAQIYRVTWFISWSPCFSCACEVRAFLQENTHVRLRIFAARIADHWPLYKEALQMLRDAGAQVSIMTYDEFKHCWDTFVDHQGAPFQPWDGLDEHSQALSRRLRAILQNQGN

SEQ ID NO: 955 - protein, 187 aa, synthetic construct
MEASPASGPRHLMDPHTFYSNFNNKIGRHKLCYEVERLDNGTWVKMDQHRGFLHNQPRRHAELLFLDLVPSLQLDPAQIYRVTWFISWSPCFSCACEVRAFLQENTHVRLRIFAARIADHWPLYKEALQMLRDAGAQVSIMTYDEFKHCWDTFVDHQGAPFQPWDGLDEHSQALSRRLRAILQNQGN

SEQ ID NO: 956 - protein, 187 aa, synthetic construct
MEASPASGPRHLMDPHTFYSNFNNKIGRHKTCYEVERLDNGTWVKMDQHRGFLHNQPRRHAELLFLDLVPSLQLDPAQIYRVTWFISWSPCFSCACEVRAFLQENTHVRLRIFAARIADHWPLYKEALQMLRDAGAQVSIMTYDEFKHCWDTFVDHQGAPFQPWDGLDEHSQALSRRLRAILQNQGN

SEQ ID NO: 957 - protein, 191 aa, synthetic construct
MEASPASGPRHLMDPHTFYSNFNNKIGRHKTYLCYEVERLDNGTWVKMDQHRGFLHNQPRRHAELLFLDLVPSLQLDPAQIYRVTWFISWSPCASWGCACEVRAFLQENTHVRLRIFAARIADHWPLYKEALQMLRDAGAQVSIMTYDEFKHCWDTFVDHQGAPFQPWDGLDEHSQALSRRLRAILQNQGN

SEQ ID NO: 958 - protein, 191 aa, synthetic construct
MEASPASGPRHLMDPHTFYSNFNNKIGRHKTYLCYEVERLDNGTWVKMDQHRGFLHNQPRRHAELLFLDLVPSLQLDPAQIYRVTWFISWSPCCSWGCACEVRAFLQENTHVRLRIFAARIADHWPLYKEALQMLRDAGAQVSIMTYDEFKHCWDTFVDHQGAPFQPWDGLDEHSQALSRRLRAILQNQGN

SEQ ID NO: 959 - protein, 191 aa, synthetic construct
MEASPASGPRHLMDPHTFYSNFNNKIGRHKTYLCYEVERLDNGTWVKMDQHRGFLHNQPRRHAELLFLDLVPSLQLDPAQIYRVTWFISWSPCDSWGCACEVRAFLQENTHVRLRIFAARIADHWPLYKEALQMLRDAGAQVSIMTYDEFKHCWDTFVDHQGAPFQPWDGLDEHSQALSRRLRAILQNQGN

SEQ ID NO: 960 - protein, 191 aa, synthetic construct
MEASPASGPRHLMDPHTFYSNFNNKIGRHKTYLCYEVERLDNGTWVKMDQHRGFLHNQPRRHAELLFLDLVPSLQLDPAQIYRVTWFISWSPCESWGCACEVRAFLQENTHVRLRIFAARIADHWPLYKEALQMLRDAGAQVSIMTYDEFKHCWDTFVDHQGAPFQPWDGLDEHSQALSRRLRAILQNQGN

SEQ ID NO: 961 - protein, 191 aa, synthetic construct
MEASPASGPRHLMDPHTFYSNFNNKIGRHKTYLCYEVERLDNGTWVKMDQHRGFLHNQPRRHAELLFLDLVPSLQLDPAQIYRVTWFISWSPCGSWGCACEVRAFLQENTHVRLRIFAARIADHWPLYKEALQMLRDAGAQVSIMTYDEFKHCWDTFVDHQGAPFQPWDGLDEHSQALSRRLRAILQNQGN

SEQ ID NO: 962 - protein, 191 aa, synthetic construct
MEASPASGPRHLMDPHTFYSNFNNKIGRHKTYLCYEVERLDNGTWVKMDQHRGFLHNQPRRHAELLFLDLVPSLQLDPAQIYRVTWFISWSPCHSWGCACEVRAFLQENTHVRLRIFAARIADHWPLYKEALQMLRDAGAQVSIMTYDEFKHCWDTFVDHQGAPFQPWDGLDEHSQALSRRLRAILQNQGN

SEQ ID NO: 963 - protein, 191 aa, synthetic construct
MEASPASGPRHLMDPHTFYSNFNNKIGRHKTYLCYEVERLDNGTWVKMDQHRGFLHNQPRRHAELLFLDLVPSLQLDPAQIYRVTWFISWSPCISWGCACEVRAFLQENTHVRLRIFAARIADHWPLYKEALQMLRDAGAQVSIMTYDEFKHCWDTFVDHQGAPFQPWDGLDEHSQALSRRLRAILQNQGN

SEQ ID NO: 964 - protein, 191 aa, synthetic construct
MEASPASGPRHLMDPHTFYSNFNNKIGRHKTYLCYEVERLDNGTWVKMDQHRGFLHNQPRRHAELLFLDLVPSLQLDPAQIYRVTWFISWSPCKSWGCACEVRAFLQENTHVRLRIFAARIADHWPLYKEALQMLRDAGAQVSIMTYDEFKHCWDTFVDHQGAPFQPWDGLDEHSQALSRRLRAILQNQGN

SEQ ID NO: 965 - protein, 191 aa, synthetic construct
MEASPASGPRHLMDPHTFYSNFNNKIGRHKTYLCYEVERLDNGTWVKMDQHRGFLHNQPRRHAELLFLDLVPSLQLDPAQIYRVTWFISWSPCLSWGCACEVRAFLQENTHVRLRIFAARIADHWPLYKEALQMLRDAGAQVSIMTYDEFKHCWDTFVDHQGAPFQPWDGLDEHSQALSRRLRAILQNQGN

SEQ ID NO: 966 - protein, 191 aa, synthetic construct
MEASPASGPRHLMDPHTFYSNFNNKIGRHKTYLCYEVERLDNGTWVKMDQHRGFLHNQPRRHAELLFLDLVPSLQLDPAQIYRVTWFISWSPCMSWGCACEVRAFLQENTHVRLRIFAARIADHWPLYKEALQMLRDAGAQVSIMTYDEFKHCWDTFVDHQGAPFQPWDGLDEHSQALSRRLRAILQNQGN

SEQ ID NO: 967 - skipped

SEQ ID NO: 968 - protein, 191 aa, synthetic construct
MEASPASGPRHLMDPHTFYSNFNNKIGRHKTYLCYEVERLDNGTWVKMDQHRGFLHNQPRRHAELLFLDLVPSLQLDPAQIYRVTWFISWSPCPSWGCACEVRAFLQENTHVRLRIFAARIADHWPLYKEALQMLRDAGAQVSIMTYDEFKHCWDTFVDHQGAPFQPWDGLDEHSQALSRRLRAILQNQGN

SEQ ID NO: 969 - protein, 191 aa, synthetic construct
MEASPASGPRHLMDPHTFYSNFNNKIGRHKTYLCYEVERLDNGTWVKMDQHRGFLHNQPRRHAELLFLDLVPSLQLDPAQIYRVTWFISWSPCQSWGCACEVRAFLQENTHVRLRIFAARIADHWPLYKEALQMLRDAGAQVSIMTYDEFKHCWDTFVDHQGAPFQPWDGLDEHSQALSRRLRAILQNQGN

SEQ ID NO: 970 - protein, 191 aa, synthetic construct
MEASPASGPRHLMDPHTFYSNFNNKIGRHKTYLCYEVERLDNGTWVKMDQHRGFLHNQPRRHAELLFLDLVPSLQLDPAQIYRVTWFISWSPCRSWGCACEVRAFLQENTHVRLRIFAARIADHWPLYKEALQMLRDAGAQVSIMTYDEFKHCWDTFVDHQGAPFQPWDGLDEHSQALSRRLRAILQNQGN

SEQ ID NO: 971 - protein, 191 aa, synthetic construct
MEASPASGPRHLMDPHTFYSNFNNKIGRHKTYLCYEVERLDNGTWVKMDQHRGFLHNQPRRHAELLFLDLVPSLQLDPAQIYRVTWFISWSPCSSWGCACEVRAFLQENTHVRLRIFAARIADHWPLYKEALQMLRDAGAQVSIMTYDEFKHCWDTFVDHQGAPFQPWDGLDEHSQALSRRLRAILQNQGN

SEQ ID NO: 972 - protein, 191 aa, synthetic construct
MEASPASGPRHLMDPHTFYSNFNNKIGRHKTYLCYEVERLDNGTWVKMDQHRGFLHNQPRRHAELLFLDLVPSLQLDPAQIYRVTWFISWSPCTSWGCACEVRAFLQENTHVRLRIFAARIADHWPLYKEALQMLRDAGAQVSIMTYDEFKHCWDTFVDHQGAPFQPWDGLDEHSQALSRRLRAILQNQGN

SEQ ID NO: 973 - protein, 191 aa, synthetic construct
MEASPASGPRHLMDPHTFYSNFNNKIGRHKTYLCYEVERLDNGTWVKMDQHRGFLHNQPRRHAELLFLDLVPSLQLDPAQIYRVTWFISWSPCVSWGCACEVRAFLQENTHVRLRIFAARIADHWPLYKEALQMLRDAGAQVSIMTYDEFKHCWDTFVDHQGAPFQPWDGLDEHSQALSRRLRAILQNQGN

SEQ ID NO: 974 - protein, 191 aa, synthetic construct
MEASPASGPRHLMDPHTFYSNFNNKIGRHKTYLCYEVERLDNGTWVKMDQHRGFLHNQPRRHAELLFLDLVPSLQLDPAQIYRVTWFISWSPCWSWGCACEVRAFLQENTHVRLRIFAARIADHWPLYKEALQMLRDAGAQVSIMTYDEFKHCWDTFVDHQGAPFQPWDGLDEHSQALSRRLRAILQNQGN

SEQ ID NO: 975 - protein, 191 aa, synthetic construct
MEASPASGPRHLMDPHTFYSNFNNKIGRHKTYLCYEVERLDNGTWVKMDQHRGFLHNQPRRHAELLFLDLVPSLQLDPAQIYRVTWFISWSPCYSWGCACEVRAFLQENTHVRLRIFAARIADHWPLYKEALQMLRDAGAQVSIMTYDEFKHCWDTFVDHQGAPFQPWDGLDEHSQALSRRLRAILQNQGN

SEQ ID NO: 976 - protein, 190 aa, synthetic construct
MEASPASGPRHLMDPHTFYSNFNNKIGRHKTYLCYEVERLDNGTWVKMDQHRGFLHNQPRRHAELLFLDLVPSLQLDPAQIYRVTWFISWSPCSWGCACEVRAFLQENTHVRLRIFAARIADHWPLYKEALQMLRDAGAQVSIMTYDEFKHCWDTFVDHQGAPFQPWDGLDEHSQALSRRLRAILQNQGN

SEQ ID NO: 977 - protein, 191 aa, synthetic construct
MEASPASGPRHLMDPHTFYSNFNNKIGRHKTYLCYEVERLDNGTWVKMDQHRGFLHNQPRRHAELLFLDLVPSLQLDPAQIYRVTWFISWSPCFSAGCACEVRAFLQENTHVRLRIFAARIADHWPLYKEALQMLRDAGAQVSIMTYDEFKHCWDTFVDHQGAPFQPWDGLDEHSQALSRRLRAILQNQGN

SEQ ID NO: 978 - skipped

SEQ ID NO: 979 - protein, 191 aa, synthetic construct
MEASPASGPRHLMDPHTFYSNFNNKIGRHKTYLCYEVERLDNGTWVKMDQHRGFLHNQPRRHAELLFLDLVPSLQLDPAQIYRVTWFISWSPCFSDGCACEVRAFLQENTHVRLRIFAARIADHWPLYKEALQMLRDAGAQVSIMTYDEFKHCWDTFVDHQGAPFQPWDGLDEHSQALSRRLRAILQNQGN

SEQ ID NO: 980 - protein, 191 aa, synthetic construct
MEASPASGPRHLMDPHTFYSNFNNKIGRHKTYLCYEVERLDNGTWVKMDQHRGFLHNQPRRHAELLFLDLVPSLQLDPAQIYRVTWFISWSPCFSEGCACEVRAFLQENTHVRLRIFAARIADHWPLYKEALQMLRDAGAQVSIMTYDEFKHCWDTFVDHQGAPFQPWDGLDEHSQALSRRLRAILQNQGN

SEQ ID NO: 981 - protein, 191 aa, synthetic construct
MEASPASGPRHLMDPHTFYSNFNNKIGRHKTYLCYEVERLDNGTWVKMDQHRGFLHNQPRRHAELLFLDLVPSLQLDPAQIYRVTWFISWSPCFSFGCACEVRAFLQENTHVRLRIFAARIADHWPLYKEALQMLRDAGAQVSIMTYDEFKHCWDTFVDHQGAPFQPWDGLDEHSQALSRRLRAILQNQGN

SEQ ID NO: 982 - protein, 191 aa, synthetic construct
MEASPASGPRHLMDPHTFYSNFNNKIGRHKTYLCYEVERLDNGTWVKMDQHRGFLHNQPRRHAELLFLDLVPSLQLDPAQIYRVTWFISWSPCFSGGCACEVRAFLQENTHVRLRIFAARIADHWPLYKEALQMLRDAGAQVSIMTYDEFKHCWDTFVDHQGAPFQPWDGLDEHSQALSRRLRAILQNQGN

SEQ ID NO: 983 - protein, 191 aa, synthetic construct
MEASPASGPRHLMDPHTFYSNFNNKIGRHKTYLCYEVERLDNGTWVKMDQHRGFLHNQPRRHAELLFLDLVPSLQLDPAQIYRVTWFISWSPCFSHGCACEVRAFLQENTHVRLRIFAARIADHWPLYKEALQMLRDAGAQVSIMTYDEFKHCWDTFVDHQGAPFQPWDGLDEHSQALSRRLRAILQNQGN

SEQ ID NO: 984 - protein, 191 aa, synthetic construct
MEASPASGPRHLMDPHTFYSNFNNKIGRHKTYLCYEVERLDNGTWVKMDQHRGFLHNQPRRHAELLFLDLVPSLQLDPAQIYRVTWFISWSPCFSIGCACEVRAFLQENTHVRLRIFAARIADHWPLYKEALQMLRDAGAQVSIMTYDEFKHCWDTFVDHQGAPFQPWDGLDEHSQALSRRLRAILQNQGN

SEQ ID NO: 985 - protein, 191 aa, synthetic construct
MEASPASGPRHLMDPHTFYSNFNNKIGRHKTYLCYEVERLDNGTWVKMDQHRGFLHNQPRRHAELLFLDLVPSLQLDPAQIYRVTWFISWSPCFSKGCACEVRAFLQENTHVRLRIFAARIADHWPLYKEALQMLRDAGAQVSIMTYDEFKHCWDTFVDHQGAPFQPWDGLDEHSQALSRRLRAILQNQGN

SEQ ID NO: 986 - skipped

SEQ ID NO: 987 - protein, 191 aa, synthetic construct
MEASPASGPRHLMDPHTFYSNFNNKIGRHKTYLCYEVERLDNGTWVKMDQHRGFLHNQPRRHAELLFLDLVPSLQLDPAQIYRVTWFISWSPCFSMGCACEVRAFLQENTHVRLRIFAARIADHWPLYKEALQMLRDAGAQVSIMTYDEFKHCWDTFVDHQGAPFQPWDGLDEHSQALSRRLRAILQNQGN

SEQ ID NO: 988 - protein, 191 aa, synthetic construct
MEASPASGPRHLMDPHTFYSNFNNKIGRHKTYLCYEVERLDNGTWVKMDQHRGFLHNQPRRHAELLFLDLVPSLQLDPAQIYRVTWFISWSPCFSNGCACEVRAFLQENTHVRLRIFAARIADHWPLYKEALQMLRDAGAQVSIMTYDEFKHCWDTFVDHQGAPFQPWDGLDEHSQALSRRLRAILQNQGN

SEQ ID NO: 989 - protein, 191 aa, synthetic construct
MEASPASGPRHLMDPHTFYSNFNNKIGRHKTYLCYEVERLDNGTWVKMDQHRGFLHNQPRRHAELLFLDLVPSLQLDPAQIYRVTWFISWSPCFSPGCACEVRAFLQENTHVRLRIFAARIADHWPLYKEALQMLRDAGAQVSIMTYDEFKHCWDTFVDHQGAPFQPWDGLDEHSQALSRRLRAILQNQGN

SEQ ID NO: 990 - protein, 191 aa, synthetic construct
MEASPASGPRHLMDPHTFYSNFNNKIGRHKTYLCYEVERLDNGTWVKMDQHRGFLHNQPRRHAELLFLDLVPSLQLDPAQIYRVTWFISWSPCFSQGCACEVRAFLQENTHVRLRIFAARIADHWPLYKEALQMLRDAGAQVSIMTYDEFKHCWDTFVDHQGAPFQPWDGLDEHSQALSRRLRAILQNQGN

SEQ ID NO: 991 - skipped

SEQ ID NO: 992 - protein, 191 aa, synthetic construct
MEASPASGPRHLMDPHTFYSNFNNKIGRHKTYLCYEVERLDNGTWVKMDQHRGFLHNQPRRHAELLFLDLVPSLQLDPAQIYRVTWFISWSPCFSSGCACEVRAFLQENTHVRLRIFAARIADHWPLYKEALQMLRDAGAQVSIMTYDEFKHCWDTFVDHQGAPFQPWDGLDEHSQALSRRLRAILQNQGN

SEQ ID NO: 993 - protein, 191 aa, synthetic construct
MEASPASGPRHLMDPHTFYSNFNNKIGRHKTYLCYEVERLDNGTWVKMDQHRGFLHNQPRRHAELLFLDLVPSLQLDPAQIYRVTWFISWSPCFSTGCACEVRAFLQENTHVRLRIFAARIADHWPLYKEALQMLRDAGAQVSIMTYDEFKHCWDTFVDHQGAPFQPWDGLDEHSQALSRRLRAILQNQGN

SEQ ID NO: 994 - protein, 191 aa, synthetic construct
MEASPASGPRHLMDPHTFYSNFNNKIGRHKTYLCYEVERLDNGTWVKMDQHRGFLHNQPRRHAELLFLDLVPSLQLDPAQIYRVTWFISWSPCFSVGCACEVRAFLQENTHVRLRIFAARIADHWPLYKEALQMLRDAGAQVSIMTYDEFKHCWDTFVDHQGAPFQPWDGLDEHSQALSRRLRAILQNQGN

SEQ ID NO: 995 - protein, 191 aa, synthetic construct
MEASPASGPRHLMDPHTFYSNFNNKIGRHKTYLCYEVERLDNGTWVKMDQHRGFLHNQPRRHAELLFLDLVPSLQLDPAQIYRVTWFISWSPCFSYGCACEVRAFLQENTHVRLRIFAARIADHWPLYKEALQMLRDAGAQVSIMTYDEFKHCWDTFVDHQGAPFQPWDGLDEHSQALSRRLRAILQNQGN

SEQ ID NO: 996 - protein, 190 aa, synthetic construct
MEASPASGPRHLMDPHTFYSNFNNKIGRHKTYLCYEVERLDNGTWVKMDQHRGFLHNQPRRHAELLFLDLVPSLQLDPAQIYRVTWFISWSPCFSGCACEVRAFLQENTHVRLRIFAARIADHWPLYKEALQMLRDAGAQVSIMTYDEFKHCWDTFVDHQGAPFQPWDGLDEHSQALSRRLRAILQNQGN

SEQ ID NO: 997 - protein, 191 aa, synthetic construct
MEASPASGPRHLMDPHTFYSNFNNKIGRHKTYLCYEVERLDNGTWVKMDQHRGFLHNQPRRHAELLFLDLVPSLQLDPAQIYRVTWFISWSPCFSWGCACEVRAFLAENTHVRLRIFAARIADHWPLYKEALQMLRDAGAQVSIMTYDEFKHCWDTFVDHQGAPFQPWDGLDEHSQALSRRLRAILQNQGN

SEQ ID NO: 998 - skipped

SEQ ID NO: 999 - protein, 191 aa, synthetic construct
MEASPASGPRHLMDPHTFYSNFNNKIGRHKTYLCYEVERLDNGTWVKMDQHRGFLHNQPRRHAELLFLDLVPSLQLDPAQIYRVTWFISWSPCFSWGCACEVRAFLDENTHVRLRIFAARIADHWPLYKEALQMLRDAGAQVSIMTYDEFKHCWDTFVDHQGAPFQPWDGLDEHSQALSRRLRAILQNQGN

SEQ ID NO: 1000 - protein, 191 aa, synthetic construct
MEASPASGPRHLMDPHTFYSNFNNKIGRHKTYLCYEVERLDNGTWVKMDQHRGFLHNQPRRHAELLFLDLVPSLQLDPAQIYRVTWFISWSPCFSWGCACEVRAFLEENTHVRLRIFAARIADHWPLYKEALQMLRDAGAQVSIMTYDEFKHCWDTFVDHQGAPFQPWDGLDEHSQALSRRLRAILQNQGN

SEQ ID NO: 1001 - protein, 191 aa, synthetic construct
MEASPASGPRHLMDPHTFYSNFNNKIGRHKTYLCYEVERLDNGTWVKMDQHRGFLHNQPRRHAELLFLDLVPSLQLDPAQIYRVTWFISWSPCFSWGCACEVRAFLFENTHVRLRIFAARIADHWPLYKEALQMLRDAGAQVSIMTYDEFKHCWDTFVDHQGAPFQPWDGLDEHSQALSRRLRAILQNQGN

SEQ ID NO: 1002 - protein, 191 aa, synthetic construct
MEASPASGPRHLMDPHTFYSNFNNKIGRHKTYLCYEVERLDNGTWVKMDQHRGFLHNQPRRHAELLFLDLVPSLQLDPAQIYRVTWFISWSPCFSWGCACEVRAFLGENTHVRLRIFAARIADHWPLYKEALQMLRDAGAQVSIMTYDEFKHCWDTFVDHQGAPFQPWDGLDEHSQALSRRLRAILQNQGN

SEQ ID NO: 1003 - protein, 191 aa, synthetic construct
MEASPASGPRHLMDPHTFYSNFNNKIGRHKTYLCYEVERLDNGTWVKMDQHRGFLHNQPRRHAELLFLDLVPSLQLDPAQIYRVTWFISWSPCFSWGCACEVRAFLHENTHVRLRIFAARIADHWPLYKEALQMLRDAGAQVSIMTYDEFKHCWDTFVDHQGAPFQPWDGLDEHSQALSRRLRAILQNQGN

SEQ ID NO: 1004 - protein, 191 aa, synthetic construct
MEASPASGPRHLMDPHTFYSNFNNKIGRHKTYLCYEVERLDNGTWVKMDQHRGFLHNQPRRHAELLFLDLVPSLQLDPAQIYRVTWFISWSPCFSWGCACEVRAFLIENTHVRLRIFAARIADHWPLYKEALQMLRDAGAQVSIMTYDEFKHCWDTFVDHQGAPFQPWDGLDEHSQALSRRLRAILQNQGN

SEQ ID NO: 1005-1007 - skipped (3 entries)

SEQ ID NO: 1008 - protein, 191 aa, synthetic construct
MEASPASGPRHLMDPHTFYSNFNNKIGRHKTYLCYEVERLDNGTWVKMDQHRGFLHNQPRRHAELLFLDLVPSLQLDPAQIYRVTWFISWSPCFSWGCACEVRAFLNENTHVRLRIFAARIADHWPLYKEALQMLRDAGAQVSIMTYDEFKHCWDTFVDHQGAPFQPWDGLDEHSQALSRRLRAILQNQGN

SEQ ID NO: 1009 - protein, 191 aa, synthetic construct
MEASPASGPRHLMDPHTFYSNFNNKIGRHKTYLCYEVERLDNGTWVKMDQHRGFLHNQPRRHAELLFLDLVPSLQLDPAQIYRVTWFISWSPCFSWGCACEVRAFLPENTHVRLRIFAARIADHWPLYKEALQMLRDAGAQVSIMTYDEFKHCWDTFVDHQGAPFQPWDGLDEHSQALSRRLRAILQNQGN

SEQ ID NO: 1010 - protein, 191 aa, synthetic construct
MEASPASGPRHLMDPHTFYSNFNNKIGRHKTYLCYEVERLDNGTWVKMDQHRGFLHNQPRRHAELLFLDLVPSLQLDPAQIYRVTWFISWSPCFSWGCACEVRAFLRENTHVRLRIFAARIADHWPLYKEALQMLRDAGAQVSIMTYDEFKHCWDTFVDHQGAPFQPWDGLDEHSQALSRRLRAILQNQGN

SEQ ID NO: 1011 - protein, 191 aa, synthetic construct
MEASPASGPRHLMDPHTFYSNFNNKIGRHKTYLCYEVERLDNGTWVKMDQHRGFLHNQPRRHAELLFLDLVPSLQLDPAQIYRVTWFISWSPCFSWGCACEVRAFLSENTHVRLRIFAARIADHWPLYKEALQMLRDAGAQVSIMTYDEFKHCWDTFVDHQGAPFQPWDGLDEHSQALSRRLRAILQNQGN

SEQ ID NO: 1012 - protein, 191 aa, synthetic construct
MEASPASGPRHLMDPHTFYSNFNNKIGRHKTYLCYEVERLDNGTWVKMDQHRGFLHNQPRRHAELLFLDLVPSLQLDPAQIYRVTWFISWSPCFSWGCACEVRAFLTENTHVRLRIFAARIADHWPLYKEALQMLRDAGAQVSIMTYDEFKHCWDTFVDHQGAPFQPWDGLDEHSQALSRRLRAILQNQGN

SEQ ID NO: 1013 - protein, 191 aa, synthetic construct
MEASPASGPRHLMDPHTFYSNFNNKIGRHKTYLCYEVERLDNGTWVKMDQHRGFLHNQPRRHAELLFLDLVPSLQLDPAQIYRVTWFISWSPCFSWGCACEVRAFLVENTHVRLRIFAARIADHWPLYKEALQMLRDAGAQVSIMTYDEFKHCWDTFVDHQGAPFQPWDGLDEHSQALSRRLRAILQNQGN

SEQ ID NO: 1014-1015 - skipped (2 entries)

SEQ ID NO: 1016 - protein, 190 aa, synthetic construct
MEASPASGPRHLMDPHTFYSNFNNKIGRHKTYLCYEVERLDNGTWVKMDQHRGFLHNQPRRHAELLFLDLVPSLQLDPAQIYRVTWFISWSPCFSWGCACEVRAFLENTHVRLRIFAARIADHWPLYKEALQMLRDAGAQVSIMTYDEFKHCWDTFVDHQGAPFQPWDGLDEHSQALSRRLRAILQNQGN

SEQ ID NO: 1017 - skipped

SEQ ID NO: 1018 - protein, 191 aa, synthetic construct
MEASPASGPRHLMDPHTFYSNFNNKIGRHKTYLCYEVERLDNGTWVKMDQHRGFLHNQPRRHAELLFLDLVPSLQLDPAQIYRVTWFISWSPCFSWGCACEVRAFLQENTHVRLRIFAARIADHWPLYKEALQCLRDAGAQVSIMTYDEFKHCWDTFVDHQGAPFQPWDGLDEHSQALSRRLRAILQNQGN

SEQ ID NO: 1019 - protein, 191 aa, synthetic construct
MEASPASGPRHLMDPHTFYSNFNNKIGRHKTYLCYEVERLDNGTWVKMDQHRGFLHNQPRRHAELLFLDLVPSLQLDPAQIYRVTWFISWSPCFSWGCACEVRAFLQENTHVRLRIFAARIADHWPLYKEALQDLRDAGAQVSIMTYDEFKHCWDTFVDHQGAPFQPWDGLDEHSQALSRRLRAILQNQGN

SEQ ID NO: 1020 - protein, 191 aa, synthetic construct
MEASPASGPRHLMDPHTFYSNFNNKIGRHKTYLCYEVERLDNGTWVKMDQHRGFLHNQPRRHAELLFLDLVPSLQLDPAQIYRVTWFISWSPCFSWGCACEVRAFLQENTHVRLRIFAARIADHWPLYKEALQELRDAGAQVSIMTYDEFKHCWDTFVDHQGAPFQPWDGLDEHSQALSRRLRAILQNQGN

SEQ ID NO: 1021 - protein, 191 aa, synthetic construct
MEASPASGPRHLMDPHTFYSNFNNKIGRHKTYLCYEVERLDNGTWVKMDQHRGFLHNQPRRHAELLFLDLVPSLQLDPAQIYRVTWFISWSPCFSWGCACEVRAFLQENTHVRLRIFAARIADHWPLYKEALQFLRDAGAQVSIMTYDEFKHCWDTFVDHQGAPFQPWDGLDEHSQALSRRLRAILQNQGN

SEQ ID NO: 1022 - protein, 191 aa, synthetic construct
MEASPASGPRHLMDPHTFYSNFNNKIGRHKTYLCYEVERLDNGTWVKMDQHRGFLHNQPRRHAELLFLDLVPSLQLDPAQIYRVTWFISWSPCFSWGCACEVRAFLQENTHVRLRIFAARIADHWPLYKEALQGLRDAGAQVSIMTYDEFKHCWDTFVDHQGAPFQPWDGLDEHSQALSRRLRAILQNQGN

SEQ ID NO: 1023 - protein, 191 aa, synthetic construct
MEASPASGPRHLMDPHTFYSNFNNKIGRHKTYLCYEVERLDNGTWVKMDQHRGFLHNQPRRHAELLFLDLVPSLQLDPAQIYRVTWFISWSPCFSWGCACEVRAFLQENTHVRLRIFAARIADHWPLYKEALQHLRDAGAQVSIMTYDEFKHCWDTFVDHQGAPFQPWDGLDEHSQALSRRLRAILQNQGN

SEQ ID NO: 1024 - protein, 191 aa, synthetic construct
MEASPASGPRHLMDPHTFYSNFNNKIGRHKTYLCYEVERLDNGTWVKMDQHRGFLHNQPRRHAELLFLDLVPSLQLDPAQIYRVTWFISWSPCFSWGCACEVRAFLQENTHVRLRIFAARIADHWPLYKEALQILRDAGAQVSIMTYDEFKHCWDTFVDHQGAPFQPWDGLDEHSQALSRRLRAILQNQGN

SEQ ID NO: 1025 - protein, 191 aa, synthetic construct
MEASPASGPRHLMDPHTFYSNFNNKIGRHKTYLCYEVERLDNGTWVKMDQHRGFLHNQPRRHAELLFLDLVPSLQLDPAQIYRVTWFISWSPCFSWGCACEVRAFLQENTHVRLRIFAARIADHWPLYKEALQKLRDAGAQVSIMTYDEFKHCWDTFVDHQGAPFQPWDGLDEHSQALSRRLRAILQNQGN

SEQ ID NO: 1026 - skipped

SEQ ID NO: 1027 - protein, 191 aa, synthetic construct
MEASPASGPRHLMDPHTFYSNFNNKIGRHKTYLCYEVERLDNGTWVKMDQHRGFLHNQPRRHAELLFLDLVPSLQLDPAQIYRVTWFISWSPCFSWGCACEVRAFLQENTHVRLRIFAARIADHWPLYKEALQNLRDAGAQVSIMTYDEFKHCWDTFVDHQGAPFQPWDGLDEHSQALSRRLRAILQNQGN

SEQ ID NO: 1028 - protein, 191 aa, synthetic construct
MEASPASGPRHLMDPHTFYSNFNNKIGRHKTYLCYEVERLDNGTWVKMDQHRGFLHNQPRRHAELLFLDLVPSLQLDPAQIYRVTWFISWSPCFSWGCACEVRAFLQENTHVRLRIFAARIADHWPLYKEALQPLRDAGAQVSIMTYDEFKHCWDTFVDHQGAPFQPWDGLDEHSQALSRRLRAILQNQGN

SEQ ID NO: 1029 - protein, 191 aa, synthetic construct
MEASPASGPRHLMDPHTFYSNFNNKIGRHKTYLCYEVERLDNGTWVKMDQHRGFLHNQPRRHAELLFLDLVPSLQLDPAQIYRVTWFISWSPCFSWGCACEVRAFLQENTHVRLRIFAARIADHWPLYKEALQQLRDAGAQVSIMTYDEFKHCWDTFVDHQGAPFQPWDGLDEHSQALSRRLRAILQNQGN

SEQ ID NO: 1030 - skipped

SEQ ID NO: 1031 - protein, 191 aa, synthetic construct
MEASPASGPRHLMDPHTFYSNFNNKIGRHKTYLCYEVERLDNGTWVKMDQHRGFLHNQPRRHAELLFLDLVPSLQLDPAQIYRVTWFISWSPCFSWGCACEVRAFLQENTHVRLRIFAARIADHWPLYKEALQSLRDAGAQVSIMTYDEFKHCWDTFVDHQGAPFQPWDGLDEHSQALSRRLRAILQNQGN

SEQ ID NO: 1032 - skipped

SEQ ID NO: 1033 - protein, 191 aa, synthetic construct
MEASPASGPRHLMDPHTFYSNFNNKIGRHKTYLCYEVERLDNGTWVKMDQHRGFLHNQPRRHAELLFLDLVPSLQLDPAQIYRVTWFISWSPCFSWGCACEVRAFLQENTHVRLRIFAARIADHWPLYKEALQVLRDAGAQVSIMTYDEFKHCWDTFVDHQGAPFQPWDGLDEHSQALSRRLRAILQNQGN

SEQ ID NO: 1034 - skipped

SEQ ID NO: 1035 - protein, 191 aa, synthetic construct
MEASPASGPRHLMDPHTFYSNFNNKIGRHKTYLCYEVERLDNGTWVKMDQHRGFLHNQPRRHAELLFLDLVPSLQLDPAQIYRVTWFISWSPCFSWGCACEVRAFLQENTHVRLRIFAARIADHWPLYKEALQYLRDAGAQVSIMTYDEFKHCWDTFVDHQGAPFQPWDGLDEHSQALSRRLRAILQNQGN

SEQ ID NO: 1036 - protein, 190 aa, synthetic construct
MEASPASGPRHLMDPHTFYSNFNNKIGRHKTYLCYEVERLDNGTWVKMDQHRGFLHNQPRRHAELLFLDLVPSLQLDPAQIYRVTWFISWSPCFSWGCACEVRAFLQENTHVRLRIFAARIADHWPLYKEALQLRDAGAQVSIMTYDEFKHCWDTFVDHQGAPFQPWDGLDEHSQALSRRLRAILQNQGN

SEQ ID NO: 1037 - protein, 189 aa, synthetic construct
MEASPASGPRHLMDPHTFYSNFNNKIGRHKTYLCYEVERLDNGTWVKMDQHRGFLHNQPRRHAELLFLDLVPSLQLDPAQIYRVTWFISWSPCFSCACEVRAFLQENTHVRLRIFAARIADHWPLYKEALQCLRDAGAQVSIMTYDEFKHCWDTFVDHQGAPFQPWDGLDEHSQALSRRLRAILQNQGN

SEQ ID NO: 1038 - protein, 189 aa, synthetic construct
MEASPASGPRHLMDPHTFYSNFNNKIGRHKTYLCYEVERLDNGTWVKMDQHRGFLHNQPRRHAELLFLDLVPSLQLDPAQIYRVTWFISWSPCCSCACEVRAFLQENTHVRLRIFAARIADHWPLYKEALQMLRDAGAQVSIMTYDEFKHCWDTFVDHQGAPFQPWDGLDEHSQALSRRLRAILQNQGN

SEQ ID NO: 1039 - protein, 189 aa, synthetic construct
MEASPASGPRHLMDPHTFYSNFNNKIGRHKTYLCYEVERLDNGTWVKMDQHRGFLHNQPRRHAELLFLDLVPSLQLDPAQIYRVTWFISWSPCFSCACEVRCFLQENTHVRLRIFAARIADHWPLYKEALQMLRDAGAQVSIMTYDEFKHCWDTFVDHQGAPFQPWDGLDEHSQALSRRLRAILQNQGN

SEQ ID NO: 1040 - protein, 191 aa, synthetic construct
MEASPASGPRHLMDPHTFYSNFNNKIGRHKTYLCYEVERLDNGTWVKMDQHRGFLHNQPRRHAELLFLDLVPSLQLDPAQIYRVTWFISWSPCFSWGCACEVRCFLQENTHVRLRIFAARIADHWPLYKEALQMLRDAGAQVSIMTYDEFKHCWDTFVDHQGAPFQPWDGLDEHSQALSRRLRAILQNQGN

SEQ ID NO: 1041 - protein, 191 aa, synthetic construct
MEASPASGPRHLMDPHTFYSNFNNKIGRHKTYLCYEVERLDNGTWVKMDQHRGFLHNQPRRHAELLFLDLVPSLQLDPAQIYRVTWFISWSPCFSWGCACEVYAFLQENTHVRLRIFAARIADHWPLYKEALQCLRDAGAQVSIMTYDEFKHCWDTFVDHQGAPFQPWDGLDEHSQALSRRLRAILQNQGN

SEQ ID NO: 1042 - protein, 191 aa, synthetic construct
MEASPASGPRHLMDPHTFYSNFNNKIGRHKTYLCYEVERLDNGTWVKMDQHRGFLHNQPRRHAELLFLDLVPSLQLDPAQIYRVTWFISWSPCCSWGCACEVRAFLQENTHVRLRIFAARIADHWPLYKEALQYLRDAGAQVSIMTYDEFKHCWDTFVDHQGAPFQPWDGLDEHSQALSRRLRAILQNQGN

SEQ ID NO: 1043 - protein, 191 aa, synthetic construct
MEASPASGPRHLMDPHTFYSNFNNKIGRHKTYLCYEVERLDNGTWVKMDQHRGFLHNQPRRHAELLFLDLVPSLQLDPAQIYRVTWFISWSPCFSWGCACEVYCFLQENTHVRLRIFAARIADHWPLYKEALQMLRDAGAQVSIMTYDEFKHCWDTFVDHQGAPFQPWDGLDEHSQALSRRLRAILQNQGN

SEQ ID NO: 1044 - protein, 189 aa, synthetic construct
MEASPASGPRHLMDPHTFYSNFNNKIGRHKTYLCYEVERLDNGTWVKMDQHRGFLHNQPRRHAELLFLDLVPSLQLDPAQIYRVTWFISWSPCCSCACEVYAFLQENTHVRLRIFAARIADHWPLYKEALQMLRDAGAQVSIMTYDEFKHCWDTFVDHQGAPFQPWDGLDEHSQALSRRLRAILQNQGN

SEQ ID NO: 1045 - protein, 191 aa, synthetic construct
MEASPASGPRHLMDPHTFYSNFNNKIGRHKTYLCYEVERLDNGTWVKMDQHRGFLHNQPRRHAELLFLDLVPSLQLDPAQIYRVTWFISWSPCFSWGCACEVWAFLQENTHVRLRIFAARIADHWPLYKEALQCLRDAGAQVSIMTYDEFKHCWDTFVDHQGAPFQPWDGLDEHSQALSRRLRAILQNQGN

SEQ ID NO: 1046 - protein, 191 aa, synthetic construct
MEASPASGPRHLMDPHTFYSNFNNKIGRHKTYLCYEVERLDNGTWVKMDQHRGFLHNQPRRHAELLFLDLVPSLQLDPAQIYRVTWFISWSPCCSWGCACEVRAFLQENTHVRLRIFAARIADHWPLYKEALQWLRDAGAQVSIMTYDEFKHCWDTFVDHQGAPFQPWDGLDEHSQALSRRLRAILQNQGN

SEQ ID NO: 1047 - protein, 191 aa, synthetic construct
MEASPASGPRHLMDPHTFYSNFNNKIGRHKTYLCYEVERLDNGTWVKMDQHRGFLHNQPRRHAELLFLDLVPSLQLDPAQIYRVTWFISWSPCFSWGCACEVWCFLQENTHVRLRIFAARIADHWPLYKEALQMLRDAGAQVSIMTYDEFKHCWDTFVDHQGAPFQPWDGLDEHSQALSRRLRAILQNQGN

SEQ ID NO: 1048 - protein, 194 aa, synthetic construct
MEASPASGPRHLMDPHTFYSNFKNVRWAKGRRETYLCYEVERLDNGTWVKMDQHRGFLHNQPRRHAELLFLDLVPSLQLDPAQIYRVTWFISWSPCFSWGCACEVRAFLQENTHVRLRIFAARIADHWPLYKEALQMLRDAGAQVSIMTYDEFKHCWDTFVDHQGAPFQPWDGLDEHSQALSRRLRAILQNQGN

SEQ ID NO: 1049 - protein, 194 aa, synthetic construct
MEASPASGPRHLMDPHTFYSNFNNEPWVRGRHETYLCYEVERLDNGTWVKMDQHRGFLHNQPRRHAELLFLDLVPSLQLDPAQIYRVTWFISWSPCFSWGCACEVRAFLQENTHVRLRIFAARIADHWPLYKEALQMLRDAGAQVSIMTYDEFKHCWDTFVDHQGAPFQPWDGLDEHSQALSRRLRAILQNQGN

SEQ ID NO: 1050 - protein, 197 aa, synthetic construct
MEASPASGPRHLMDPHTFYSNFNNKRRLRRPYYPRKALLCYEVERLDNGTWVKMDQHRGFLHNQPRRHAELLFLDLVPSLQLDPAQIYRVTWFISWSPCFSWGCACEVRAFLQENTHVRLRIFAARIADHWPLYKEALQMLRDAGAQVSIMTYDEFKHCWDTFVDHQGAPFQPWDGLDEHSQALSRRLRAILQNQGN

SEQ ID NO: 1051 - skipped

SEQ ID NO: 1052 - protein, 192 aa, synthetic construct
MEASPASGPRHLMDPHTFYSNFNNKCIGRHKTYLCYEVERLDNGTWVKMDQHRGFLHNQPRRHAELLFLDLVPSLQLDPAQIYRVTWFISWSPCFSWGCACEVRAFLQENTHVRLRIFAARIADHWPLYKEALQMLRDAGAQVSIMTYDEFKHCWDTFVDHQGAPFQPWDGLDEHSQALSRRLRAILQNQGN

SEQ ID NO: 1053 - protein, 192 aa, synthetic construct
MEASPASGPRHLMDPHTFYSNFNNKDIGRHKTYLCYEVERLDNGTWVKMDQHRGFLHNQPRRHAELLFLDLVPSLQLDPAQIYRVTWFISWSPCFSWGCACEVRAFLQENTHVRLRIFAARIADHWPLYKEALQMLRDAGAQVSIMTYDEFKHCWDTFVDHQGAPFQPWDGLDEHSQALSRRLRAILQNQGN

SEQ ID NO: 1054 - protein, 192 aa, synthetic construct
MEASPASGPRHLMDPHTFYSNFNNKEIGRHKTYLCYEVERLDNGTWVKMDQHRGFLHNQPRRHAELLFLDLVPSLQLDPAQIYRVTWFISWSPCFSWGCACEVRAFLQENTHVRLRIFAARIADHWPLYKEALQMLRDAGAQVSIMTYDEFKHCWDTFVDHQGAPFQPWDGLDEHSQALSRRLRAILQNQGN

SEQ ID NO: 1055 - protein, 192 aa, synthetic construct
MEASPASGPRHLMDPHTFYSNFNNKFIGRHKTYLCYEVERLDNGTWVKMDQHRGFLHNQPRRHAELLFLDLVPSLQLDPAQIYRVTWFISWSPCFSWGCACEVRAFLQENTHVRLRIFAARIADHWPLYKEALQMLRDAGAQVSIMTYDEFKHCWDTFVDHQGAPFQPWDGLDEHSQALSRRLRAILQNQGN

SEQ ID NO: 1056 - protein, 192 aa, synthetic construct
MEASPASGPRHLMDPHTFYSNFNNKGIGRHKTYLCYEVERLDNGTWVKMDQHRGFLHNQPRRHAELLFLDLVPSLQLDPAQIYRVTWFISWSPCFSWGCACEVRAFLQENTHVRLRIFAARIADHWPLYKEALQMLRDAGAQVSIMTYDEFKHCWDTFVDHQGAPFQPWDGLDEHSQALSRRLRAILQNQGN

SEQ ID NO: 1057 - protein, 192 aa, synthetic construct
MEASPASGPRHLMDPHTFYSNFNNKHIGRHKTYLCYEVERLDNGTWVKMDQHRGFLHNQPRRHAELLFLDLVPSLQLDPAQIYRVTWFISWSPCFSWGCACEVRAFLQENTHVRLRIFAARIADHWPLYKEALQMLRDAGAQVSIMTYDEFKHCWDTFVDHQGAPFQPWDGLDEHSQALSRRLRAILQNQGN

SEQ ID NO: 1058 - skipped

SEQ ID NO: 1059 - protein, 192 aa, synthetic construct
MEASPASGPRHLMDPHTFYSNFNNKKIGRHKTYLCYEVERLDNGTWVKMDQHRGFLHNQPRRHAELLFLDLVPSLQLDPAQIYRVTWFISWSPCFSWGCACEVRAFLQENTHVRLRIFAARIADHWPLYKEALQMLRDAGAQVSIMTYDEFKHCWDTFVDHQGAPFQPWDGLDEHSQALSRRLRAILQNQGN

SEQ ID NO: 1060 - protein, 192 aa, synthetic construct
MEASPASGPRHLMDPHTFYSNFNNKLIGRHKTYLCYEVERLDNGTWVKMDQHRGFLHNQPRRHAELLFLDLVPSLQLDPAQIYRVTWFISWSPCFSWGCACEVRAFLQENTHVRLRIFAARIADHWPLYKEALQMLRDAGAQVSIMTYDEFKHCWDTFVDHQGAPFQPWDGLDEHSQALSRRLRAILQNQGN

SEQ ID NO: 1061 - protein, 192 aa, synthetic construct
MEASPASGPRHLMDPHTFYSNFNNKMIGRHKTYLCYEVERLDNGTWVKMDQHRGFLHNQPRRHAELLFLDLVPSLQLDPAQIYRVTWFISWSPCFSWGCACEVRAFLQENTHVRLRIFAARIADHWPLYKEALQMLRDAGAQVSIMTYDEFKHCWDTFVDHQGAPFQPWDGLDEHSQALSRRLRAILQNQGN

SEQ ID NO: 1062 - protein, 192 aa, synthetic construct
MEASPASGPRHLMDPHTFYSNFNNKNIGRHKTYLCYEVERLDNGTWVKMDQHRGFLHNQPRRHAELLFLDLVPSLQLDPAQIYRVTWFISWSPCFSWGCACEVRAFLQENTHVRLRIFAARIADHWPLYKEALQMLRDAGAQVSIMTYDEFKHCWDTFVDHQGAPFQPWDGLDEHSQALSRRLRAILQNQGN

SEQ ID NO: 1063 - skipped

SEQ ID NO: 1064 - protein, 192 aa, synthetic construct
MEASPASGPRHLMDPHTFYSNFNNKQIGRHKTYLCYEVERLDNGTWVKMDQHRGFLHNQPRRHAELLFLDLVPSLQLDPAQIYRVTWFISWSPCFSWGCACEVRAFLQENTHVRLRIFAARIADHWPLYKEALQMLRDAGAQVSIMTYDEFKHCWDTFVDHQGAPFQPWDGLDEHSQALSRRLRAILQNQGN

SEQ ID NO: 1065 - protein, 192 aa, synthetic construct
MEASPASGPRHLMDPHTFYSNFNNKRIGRHKTYLCYEVERLDNGTWVKMDQHRGFLHNQPRRHAELLFLDLVPSLQLDPAQIYRVTWFISWSPCFSWGCACEVRAFLQENTHVRLRIFAARIADHWPLYKEALQMLRDAGAQVSIMTYDEFKHCWDTFVDHQGAPFQPWDGLDEHSQALSRRLRAILQNQGN

SEQ ID NO: 1066 - skipped

SEQ ID NO: 1067 - protein, 192 aa, synthetic construct
MEASPASGPRHLMDPHTFYSNFNNKTIGRHKTYLCYEVERLDNGTWVKMDQHRGFLHNQPRRHAELLFLDLVPSLQLDPAQIYRVTWFISWSPCFSWGCACEVRAFLQENTHVRLRIFAARIADHWPLYKEALQMLRDAGAQVSIMTYDEFKHCWDTFVDHQGAPFQPWDGLDEHSQALSRRLRAILQNQGN

SEQ ID NO: 1068 - skipped

SEQ ID NO: 1069 - protein, 192 aa, synthetic construct
MEASPASGPRHLMDPHTFYSNFNNKWIGRHKTYLCYEVERLDNGTWVKMDQHRGFLHNQPRRHAELLFLDLVPSLQLDPAQIYRVTWFISWSPCFSWGCACEVRAFLQENTHVRLRIFAARIADHWPLYKEALQMLRDAGAQVSIMTYDEFKHCWDTFVDHQGAPFQPWDGLDEHSQALSRRLRAILQNQGN

SEQ ID NO: 1070 - protein, 192 aa, synthetic construct
MEASPASGPRHLMDPHTFYSNFNNKYIGRHKTYLCYEVERLDNGTWVKMDQHRGFLHNQPRRHAELLFLDLVPSLQLDPAQIYRVTWFISWSPCFSWGCACEVRAFLQENTHVRLRIFAARIADHWPLYKEALQMLRDAGAQVSIMTYDEFKHCWDTFVDHQGAPFQPWDGLDEHSQALSRRLRAILQNQGN

SEQ ID NO: 1071 - skipped

SEQ ID NO: 1072 - protein, 192 aa, synthetic construct
MEASPASGPRHLMDPHTFYSNFNNKIGRCHKTYLCYEVERLDNGTWVKMDQHRGFLHNQPRRHAELLFLDLVPSLQLDPAQIYRVTWFISWSPCFSWGCACEVRAFLQENTHVRLRIFAARIADHWPLYKEALQMLRDAGAQVSIMTYDEFKHCWDTFVDHQGAPFQPWDGLDEHSQALSRRLRAILQNQGN

SEQ ID NO: 1073 - protein, 192 aa, synthetic construct
MEASPASGPRHLMDPHTFYSNFNNKIGRDHKTYLCYEVERLDNGTWVKMDQHRGFLHNQPRRHAELLFLDLVPSLQLDPAQIYRVTWFISWSPCFSWGCACEVRAFLQENTHVRLRIFAARIADHWPLYKEALQMLRDAGAQVSIMTYDEFKHCWDTFVDHQGAPFQPWDGLDEHSQALSRRLRAILQNQGN

SEQ ID NO: 1074 - protein, 192 aa, synthetic construct
MEASPASGPRHLMDPHTFYSNFNNKIGREHKTYLCYEVERLDNGTWVKMDQHRGFLHNQPRRHAELLFLDLVPSLQLDPAQIYRVTWFISWSPCFSWGCACEVRAFLQENTHVRLRIFAARIADHWPLYKEALQMLRDAGAQVSIMTYDEFKHCWDTFVDHQGAPFQPWDGLDEHSQALSRRLRAILQNQGN

SEQ ID NO: 1075 - protein, 192 aa, synthetic construct
MEASPASGPRHLMDPHTFYSNFNNKIGRFHKTYLCYEVERLDNGTWVKMDQHRGFLHNQPRRHAELLFLDLVPSLQLDPAQIYRVTWFISWSPCFSWGCACEVRAFLQENTHVRLRIFAARIADHWPLYKEALQMLRDAGAQVSIMTYDEFKHCWDTFVDHQGAPFQPWDGLDEHSQALSRRLRAILQNQGN

SEQ ID NO: 1076 - protein, 192 aa, synthetic construct
MEASPASGPRHLMDPHTFYSNFNNKIGRGHKTYLCYEVERLDNGTWVKMDQHRGFLHNQPRRHAELLFLDLVPSLQLDPAQIYRVTWFISWSPCFSWGCACEVRAFLQENTHVRLRIFAARIADHWPLYKEALQMLRDAGAQVSIMTYDEFKHCWDTFVDHQGAPFQPWDGLDEHSQALSRRLRAILQNQGN

SEQ ID NO: 1077 - protein, 192 aa, synthetic construct
MEASPASGPRHLMDPHTFYSNFNNKIGRHHKTYLCYEVERLDNGTWVKMDQHRGFLHNQPRRHAELLFLDLVPSLQLDPAQIYRVTWFISWSPCFSWGCACEVRAFLQENTHVRLRIFAARIADHWPLYKEALQMLRDAGAQVSIMTYDEFKHCWDTFVDHQGAPFQPWDGLDEHSQALSRRLRAILQNQGN

SEQ ID NO: 1078 - protein, 192 aa, synthetic construct
MEASPASGPRHLMDPHTFYSNFNNKIGRIHKTYLCYEVERLDNGTWVKMDQHRGFLHNQPRRHAELLFLDLVPSLQLDPAQIYRVTWFISWSPCFSWGCACEVRAFLQENTHVRLRIFAARIADHWPLYKEALQMLRDAGAQVSIMTYDEFKHCWDTFVDHQGAPFQPWDGLDEHSQALSRRLRAILQNQGN

SEQ ID NO: 1079 - protein, 192 aa, synthetic construct
MEASPASGPRHLMDPHTFYSNFNNKIGRKHKTYLCYEVERLDNGTWVKMDQHRGFLHNQPRRHAELLFLDLVPSLQLDPAQIYRVTWFISWSPCFSWGCACEVRAFLQENTHVRLRIFAARIADHWPLYKEALQMLRDAGAQVSIMTYDEFKHCWDTFVDHQGAPFQPWDGLDEHSQALSRRLRAILQNQGN

SEQ ID NO: 1080 - protein, 192 aa, synthetic construct
MEASPASGPRHLMDPHTFYSNFNNKIGRLHKTYLCYEVERLDNGTWVKMDQHRGFLHNQPRRHAELLFLDLVPSLQLDPAQIYRVTWFISWSPCFSWGCACEVRAFLQENTHVRLRIFAARIADHWPLYKEALQMLRDAGAQVSIMTYDEFKHCWDTFVDHQGAPFQPWDGLDEHSQALSRRLRAILQNQGN

SEQ ID NO: 1081 - protein, 192 aa, synthetic construct
MEASPASGPRHLMDPHTFYSNFNNKIGRMHKTYLCYEVERLDNGTWVKMDQHRGFLHNQPRRHAELLFLDLVPSLQLDPAQIYRVTWFISWSPCFSWGCACEVRAFLQENTHVRLRIFAARIADHWPLYKEALQMLRDAGAQVSIMTYDEFKHCWDTFVDHQGAPFQPWDGLDEHSQALSRRLRAILQNQGN

SEQ ID NO: 1082 - protein, 192 aa, synthetic construct
MEASPASGPRHLMDPHTFYSNFNNKIGRNHKTYLCYEVERLDNGTWVKMDQHRGFLHNQPRRHAELLFLDLVPSLQLDPAQIYRVTWFISWSPCFSWGCACEVRAFLQENTHVRLRIFAARIADHWPLYKEALQMLRDAGAQVSIMTYDEFKHCWDTFVDHQGAPFQPWDGLDEHSQALSRRLRAILQNQGN

SEQ ID NO: 1083 - protein, 192 aa, synthetic construct
MEASPASGPRHLMDPHTFYSNFNNKIGRPHKTYLCYEVERLDNGTWVKMDQHRGFLHNQPRRHAELLFLDLVPSLQLDPAQIYRVTWFISWSPCFSWGCACEVRAFLQENTHVRLRIFAARIADHWPLYKEALQMLRDAGAQVSIMTYDEFKHCWDTFVDHQGAPFQPWDGLDEHSQALSRRLRAILQNQGN

SEQ ID NO: 1084 - protein, 192 aa, synthetic construct
MEASPASGPRHLMDPHTFYSNFNNKIGRQHKTYLCYEVERLDNGTWVKMDQHRGFLHNQPRRHAELLFLDLVPSLQLDPAQIYRVTWFISWSPCFSWGCACEVRAFLQENTHVRLRIFAARIADHWPLYKEALQMLRDAGAQVSIMTYDEFKHCWDTFVDHQGAPFQPWDGLDEHSQALSRRLRAILQNQGN

SEQ ID NO: 1085 - protein, 192 aa, synthetic construct
MEASPASGPRHLMDPHTFYSNFNNKIGRRHKTYLCYEVERLDNGTWVKMDQHRGFLHNQPRRHAELLFLDLVPSLQLDPAQIYRVTWFISWSPCFSWGCACEVRAFLQENTHVRLRIFAARIADHWPLYKEALQMLRDAGAQVSIMTYDEFKHCWDTFVDHQGAPFQPWDGLDEHSQALSRRLRAILQNQGN

SEQ ID NO: 1086 - protein, 192 aa, synthetic construct
MEASPASGPRHLMDPHTFYSNFNNKIGRSHKTYLCYEVERLDNGTWVKMDQHRGFLHNQPRRHAELLFLDLVPSLQLDPAQIYRVTWFISWSPCFSWGCACEVRAFLQENTHVRLRIFAARIADHWPLYKEALQMLRDAGAQVSIMTYDEFKHCWDTFVDHQGAPFQPWDGLDEHSQALSRRLRAILQNQGN

SEQ ID NO: 1087 - protein, 192 aa, synthetic construct
MEASPASGPRHLMDPHTFYSNFNNKIGRTHKTYLCYEVERLDNGTWVKMDQHRGFLHNQPRRHAELLFLDLVPSLQLDPAQIYRVTWFISWSPCFSWGCACEVRAFLQENTHVRLRIFAARIADHWPLYKEALQMLRDAGAQVSIMTYDEFKHCWDTFVDHQGAPFQPWDGLDEHSQALSRRLRAILQNQGN

SEQ ID NO: 1088 - protein, 192 aa, synthetic construct
MEASPASGPRHLMDPHTFYSNFNNKIGRVHKTYLCYEVERLDNGTWVKMDQHRGFLHNQPRRHAELLFLDLVPSLQLDPAQIYRVTWFISWSPCFSWGCACEVRAFLQENTHVRLRIFAARIADHWPLYKEALQMLRDAGAQVSIMTYDEFKHCWDTFVDHQGAPFQPWDGLDEHSQALSRRLRAILQNQGN

SEQ ID NO: 1089 - protein, 192 aa, synthetic construct
MEASPASGPRHLMDPHTFYSNFNNKIGRWHKTYLCYEVERLDNGTWVKMDQHRGFLHNQPRRHAELLFLDLVPSLQLDPAQIYRVTWFISWSPCFSWGCACEVRAFLQENTHVRLRIFAARIADHWPLYKEALQMLRDAGAQVSIMTYDEFKHCWDTFVDHQGAPFQPWDGLDEHSQALSRRLRAILQNQGN

SEQ ID NO: 1090 - protein, 192 aa, synthetic construct
MEASPASGPRHLMDPHTFYSNFNNKIGRYHKTYLCYEVERLDNGTWVKMDQHRGFLHNQPRRHAELLFLDLVPSLQLDPAQIYRVTWFISWSPCFSWGCACEVRAFLQENTHVRLRIFAARIADHWPLYKEALQMLRDAGAQVSIMTYDEFKHCWDTFVDHQGAPFQPWDGLDEHSQALSRRLRAILQNQGN

SEQ ID NO: 1091 - skipped

SEQ ID NO: 1092 - protein, 192 aa, synthetic construct
MEASPASGPRHLMDPHTFYSNFNNKIGRHKTYLCYEVERLDNGTWVKMDQHRGFLHNQPRRHAELLFLDLVPSLQLDPAQIYRVTWFISWSPCFSCWGCACEVRAFLQENTHVRLRIFAARIADHWPLYKEALQMLRDAGAQVSIMTYDEFKHCWDTFVDHQGAPFQPWDGLDEHSQALSRRLRAILQNQGN

SEQ ID NO: 1093 - protein, 192 aa, synthetic construct
MEASPASGPRHLMDPHTFYSNFNNKIGRHKTYLCYEVERLDNGTWVKMDQHRGFLHNQPRRHAELLFLDLVPSLQLDPAQIYRVTWFISWSPCFSDWGCACEVRAFLQENTHVRLRIFAARIADHWPLYKEALQMLRDAGAQVSIMTYDEFKHCWDTFVDHQGAPFQPWDGLDEHSQALSRRLRAILQNQGN

SEQ ID NO: 1094 - protein, 192 aa, synthetic construct
MEASPASGPRHLMDPHTFYSNFNNKIGRHKTYLCYEVERLDNGTWVKMDQHRGFLHNQPRRHAELLFLDLVPSLQLDPAQIYRVTWFISWSPCFSEWGCACEVRAFLQENTHVRLRIFAARIADHWPLYKEALQMLRDAGAQVSIMTYDEFKHCWDTFVDHQGAPFQPWDGLDEHSQALSRRLRAILQNQGN

SEQ ID NO: 1095 - protein, 192 aa, synthetic construct
MEASPASGPRHLMDPHTFYSNFNNKIGRHKTYLCYEVERLDNGTWVKMDQHRGFLHNQPRRHAELLFLDLVPSLQLDPAQIYRVTWFISWSPCFSFWGCACEVRAFLQENTHVRLRIFAARIADHWPLYKEALQMLRDAGAQVSIMTYDEFKHCWDTFVDHQGAPFQPWDGLDEHSQALSRRLRAILQNQGN

SEQ ID NO: 1096 - protein, 192 aa, synthetic construct
MEASPASGPRHLMDPHTFYSNFNNKIGRHKTYLCYEVERLDNGTWVKMDQHRGFLHNQPRRHAELLFLDLVPSLQLDPAQIYRVTWFISWSPCFSGWGCACEVRAFLQENTHVRLRIFAARIADHWPLYKEALQMLRDAGAQVSIMTYDEFKHCWDTFVDHQGAPFQPWDGLDEHSQALSRRLRAILQNQGN

SEQ ID NO: 1097 - protein, 192 aa, synthetic construct
MEASPASGPRHLMDPHTFYSNFNNKIGRHKTYLCYEVERLDNGTWVKMDQHRGFLHNQPRRHAELLFLDLVPSLQLDPAQIYRVTWFISWSPCFSHWGCACEVRAFLQENTHVRLRIFAARIADHWPLYKEALQMLRDAGAQVSIMTYDEFKHCWDTFVDHQGAPFQPWDGLDEHSQALSRRLRAILQNQGN

SEQ ID NO: 1098 - protein, 192 aa, synthetic construct
MEASPASGPRHLMDPHTFYSNFNNKIGRHKTYLCYEVERLDNGTWVKMDQHRGFLHNQPRRHAELLFLDLVPSLQLDPAQIYRVTWFISWSPCFSIWGCACEVRAFLQENTHVRLRIFAARIADHWPLYKEALQMLRDAGAQVSIMTYDEFKHCWDTFVDHQGAPFQPWDGLDEHSQALSRRLRAILQNQGN

SEQ ID NO: 1099 - protein, 192 aa, synthetic construct
MEASPASGPRHLMDPHTFYSNFNNKIGRHKTYLCYEVERLDNGTWVKMDQHRGFLHNQPRRHAELLFLDLVPSLQLDPAQIYRVTWFISWSPCFSKWGCACEVRAFLQENTHVRLRIFAARIADHWPLYKEALQMLRDAGAQVSIMTYDEFKHCWDTFVDHQGAPFQPWDGLDEHSQALSRRLRAILQNQGN

SEQ ID NO: 1100 - protein, 192 aa, synthetic construct
MEASPASGPRHLMDPHTFYSNFNNKIGRHKTYLCYEVERLDNGTWVKMDQHRGFLHNQPRRHAELLFLDLVPSLQLDPAQIYRVTWFISWSPCFSLWGCACEVRAFLQENTHVRLRIFAARIADHWPLYKEALQMLRDAGAQVSIMTYDEFKHCWDTFVDHQGAPFQPWDGLDEHSQALSRRLRAILQNQGN

SEQ ID NO: 1101 - protein, 192 aa, synthetic construct
MEASPASGPRHLMDPHTFYSNFNNKIGRHKTYLCYEVERLDNGTWVKMDQHRGFLHNQPRRHAELLFLDLVPSLQLDPAQIYRVTWFISWSPCFSMWGCACEVRAFLQENTHVRLRIFAARIADHWPLYKEALQMLRDAGAQVSIMTYDEFKHCWDTFVDHQGAPFQPWDGLDEHSQALSRRLRAILQNQGN

SEQ ID NO: 1102 - protein, 192 aa, synthetic construct
MEASPASGPRHLMDPHTFYSNFNNKIGRHKTYLCYEVERLDNGTWVKMDQHRGFLHNQPRRHAELLFLDLVPSLQLDPAQIYRVTWFISWSPCFSNWGCACEVRAFLQENTHVRLRIFAARIADHWPLYKEALQMLRDAGAQVSIMTYDEFKHCWDTFVDHQGAPFQPWDGLDEHSQALSRRLRAILQNQGN

SEQ ID NO: 1103 - protein, 192 aa, synthetic construct
MEASPASGPRHLMDPHTFYSNFNNKIGRHKTYLCYEVERLDNGTWVKMDQHRGFLHNQPRRHAELLFLDLVPSLQLDPAQIYRVTWFISWSPCFSPWGCACEVRAFLQENTHVRLRIFAARIADHWPLYKEALQMLRDAGAQVSIMTYDEFKHCWDTFVDHQGAPFQPWDGLDEHSQALSRRLRAILQNQGN

SEQ ID NO: 1104 - protein, 192 aa, synthetic construct
MEASPASGPRHLMDPHTFYSNFNNKIGRHKTYLCYEVERLDNGTWVKMDQHRGFLHNQPRRHAELLFLDLVPSLQLDPAQIYRVTWFISWSPCFSQWGCACEVRAFLQENTHVRLRIFAARIADHWPLYKEALQMLRDAGAQVSIMTYDEFKHCWDTFVDHQGAPFQPWDGLDEHSQALSRRLRAILQNQGN

SEQ ID NO: 1105 - protein, 192 aa, synthetic construct
MEASPASGPRHLMDPHTFYSNFNNKIGRHKTYLCYEVERLDNGTWVKMDQHRGFLHNQPRRHAELLFLDLVPSLQLDPAQIYRVTWFISWSPCFSRWGCACEVRAFLQENTHVRLRIFAARIADHWPLYKEALQMLRDAGAQVSIMTYDEFKHCWDTFVDHQGAPFQPWDGLDEHSQALSRRLRAILQNQGN

SEQ ID NO: 1106 - protein, 192 aa, synthetic construct
MEASPASGPRHLMDPHTFYSNFNNKIGRHKTYLCYEVERLDNGTWVKMDQHRGFLHNQPRRHAELLFLDLVPSLQLDPAQIYRVTWFISWSPCFSSWGCACEVRAFLQENTHVRLRIFAARIADHWPLYKEALQMLRDAGAQVSIMTYDEFKHCWDTFVDHQGAPFQPWDGLDEHSQALSRRLRAILQNQGN

SEQ ID NO: 1107 - protein, 192 aa, synthetic construct
MEASPASGPRHLMDPHTFYSNFNNKIGRHKTYLCYEVERLDNGTWVKMDQHRGFLHNQPRRHAELLFLDLVPSLQLDPAQIYRVTWFISWSPCFSTWGCACEVRAFLQENTHVRLRIFAARIADHWPLYKEALQMLRDAGAQVSIMTYDEFKHCWDTFVDHQGAPFQPWDGLDEHSQALSRRLRAILQNQGN

SEQ ID NO: 1108 - protein, 192 aa, synthetic construct
MEASPASGPRHLMDPHTFYSNFNNKIGRHKTYLCYEVERLDNGTWVKMDQHRGFLHNQPRRHAELLFLDLVPSLQLDPAQIYRVTWFISWSPCFSVWGCACEVRAFLQENTHVRLRIFAARIADHWPLYKEALQMLRDAGAQVSIMTYDEFKHCWDTFVDHQGAPFQPWDGLDEHSQALSRRLRAILQNQGN

SEQ ID NO: 1109 - protein, 192 aa, synthetic construct
MEASPASGPRHLMDPHTFYSNFNNKIGRHKTYLCYEVERLDNGTWVKMDQHRGFLHNQPRRHAELLFLDLVPSLQLDPAQIYRVTWFISWSPCFSWWGCACEVRAFLQENTHVRLRIFAARIADHWPLYKEALQMLRDAGAQVSIMTYDEFKHCWDTFVDHQGAPFQPWDGLDEHSQALSRRLRAILQNQGN

SEQ ID NO: 1110 - protein, 192 aa, synthetic construct
MEASPASGPRHLMDPHTFYSNFNNKIGRHKTYLCYEVERLDNGTWVKMDQHRGFLHNQPRRHAELLFLDLVPSLQLDPAQIYRVTWFISWSPCFSYWGCACEVRAFLQENTHVRLRIFAARIADHWPLYKEALQMLRDAGAQVSIMTYDEFKHCWDTFVDHQGAPFQPWDGLDEHSQALSRRLRAILQNQGN

SEQ ID NO: 1111 - skipped

SEQ ID NO: 1112 - protein, 192 aa, synthetic construct
MEASPASGPRHLMDPHTFYSNFNNKIGRHKTYLCYEVERLDNGTWVKMDQHRGFLHNQPRRHAELLFLDLVPSLQLDPAQIYRVTWFISWSPCFSWCGCACEVRAFLQENTHVRLRIFAARIADHWPLYKEALQMLRDAGAQVSIMTYDEFKHCWDTFVDHQGAPFQPWDGLDEHSQALSRRLRAILQNQGN

SEQ ID NO: 1113 - protein, 192 aa, synthetic construct
MEASPASGPRHLMDPHTFYSNFNNKIGRHKTYLCYEVERLDNGTWVKMDQHRGFLHNQPRRHAELLFLDLVPSLQLDPAQIYRVTWFISWSPCFSWDGCACEVRAFLQENTHVRLRIFAARIADHWPLYKEALQMLRDAGAQVSIMTYDEFKHCWDTFVDHQGAPFQPWDGLDEHSQALSRRLRAILQNQGN

SEQ ID NO: 1114 - protein, 192 aa, synthetic construct
MEASPASGPRHLMDPHTFYSNFNNKIGRHKTYLCYEVERLDNGTWVKMDQHRGFLHNQPRRHAELLFLDLVPSLQLDPAQIYRVTWFISWSPCFSWEGCACEVRAFLQENTHVRLRIFAARIADHWPLYKEALQMLRDAGAQVSIMTYDEFKHCWDTFVDHQGAPFQPWDGLDEHSQALSRRLRAILQNQGN

SEQ ID NO: 1115 - protein, 192 aa, synthetic construct
MEASPASGPRHLMDPHTFYSNFNNKIGRHKTYLCYEVERLDNGTWVKMDQHRGFLHNQPRRHAELLFLDLVPSLQLDPAQIYRVTWFISWSPCFSWFGCACEVRAFLQENTHVRLRIFAARIADHWPLYKEALQMLRDAGAQVSIMTYDEFKHCWDTFVDHQGAPFQPWDGLDEHSQALSRRLRAILQNQGN

SEQ ID NO: 1116 - protein, 192 aa, synthetic construct
MEASPASGPRHLMDPHTFYSNFNNKIGRHKTYLCYEVERLDNGTWVKMDQHRGFLHNQPRRHAELLFLDLVPSLQLDPAQIYRVTWFISWSPCFSWGGCACEVRAFLQENTHVRLRIFAARIADHWPLYKEALQMLRDAGAQVSIMTYDEFKHCWDTFVDHQGAPFQPWDGLDEHSQALSRRLRAILQNQGN

SEQ ID NO: 1117 - protein, 192 aa, synthetic construct
MEASPASGPRHLMDPHTFYSNFNNKIGRHKTYLCYEVERLDNGTWVKMDQHRGFLHNQPRRHAELLFLDLVPSLQLDPAQIYRVTWFISWSPCFSWHGCACEVRAFLQENTHVRLRIFAARIADHWPLYKEALQMLRDAGAQVSIMTYDEFKHCWDTFVDHQGAPFQPWDGLDEHSQALSRRLRAILQNQGN

SEQ ID NO: 1118 - protein, 192 aa, synthetic construct
MEASPASGPRHLMDPHTFYSNFNNKIGRHKTYLCYEVERLDNGTWVKMDQHRGFLHNQPRRHAELLFLDLVPSLQLDPAQIYRVTWFISWSPCFSWIGCACEVRAFLQENTHVRLRIFAARIADHWPLYKEALQMLRDAGAQVSIMTYDEFKHCWDTFVDHQGAPFQPWDGLDEHSQALSRRLRAILQNQGN

SEQ ID NO: 1119 - protein, 192 aa, synthetic construct
MEASPASGPRHLMDPHTFYSNFNNKIGRHKTYLCYEVERLDNGTWVKMDQHRGFLHNQPRRHAELLFLDLVPSLQLDPAQIYRVTWFISWSPCFSWKGCACEVRAFLQENTHVRLRIFAARIADHWPLYKEALQMLRDAGAQVSIMTYDEFKHCWDTFVDHQGAPFQPWDGLDEHSQALSRRLRAILQNQGN

SEQ ID NO: 1120 - protein, 192 aa, synthetic construct
MEASPASGPRHLMDPHTFYSNFNNKIGRHKTYLCYEVERLDNGTWVKMDQHRGFLHNQPRRHAELLFLDLVPSLQLDPAQIYRVTWFISWSPCFSWLGCACEVRAFLQENTHVRLRIFAARIADHWPLYKEALQMLRDAGAQVSIMTYDEFKHCWDTFVDHQGAPFQPWDGLDEHSQALSRRLRAILQNQGN

SEQ ID NO: 1121 - protein, 192 aa, synthetic construct
MEASPASGPRHLMDPHTFYSNFNNKIGRHKTYLCYEVERLDNGTWVKMDQHRGFLHNQPRRHAELLFLDLVPSLQLDPAQIYRVTWFISWSPCFSWMGCACEVRAFLQENTHVRLRIFAARIADHWPLYKEALQMLRDAGAQVSIMTYDEFKHCWDTFVDHQGAPFQPWDGLDEHSQALSRRLRAILQNQGN

SEQ ID NO: 1122 - protein, 192 aa, synthetic construct
MEASPASGPRHLMDPHTFYSNFNNKIGRHKTYLCYEVERLDNGTWVKMDQHRGFLHNQPRRHAELLFLDLVPSLQLDPAQIYRVTWFISWSPCFSWNGCACEVRAFLQENTHVRLRIFAARIADHWPLYKEALQMLRDAGAQVSIMTYDEFKHCWDTFVDHQGAPFQPWDGLDEHSQALSRRLRAILQNQGN

SEQ ID NO: 1123 - protein, 192 aa, synthetic construct
MEASPASGPRHLMDPHTFYSNFNNKIGRHKTYLCYEVERLDNGTWVKMDQHRGFLHNQPRRHAELLFLDLVPSLQLDPAQIYRVTWFISWSPCFSWPGCACEVRAFLQENTHVRLRIFAARIADHWPLYKEALQMLRDAGAQVSIMTYDEFKHCWDTFVDHQGAPFQPWDGLDEHSQALSRRLRAILQNQGN

SEQ ID NO: 1124 - protein, 192 aa, synthetic construct
MEASPASGPRHLMDPHTFYSNFNNKIGRHKTYLCYEVERLDNGTWVKMDQHRGFLHNQPRRHAELLFLDLVPSLQLDPAQIYRVTWFISWSPCFSWQGCACEVRAFLQENTHVRLRIFAARIADHWPLYKEALQMLRDAGAQVSIMTYDEFKHCWDTFVDHQGAPFQPWDGLDEHSQALSRRLRAILQNQGN

SEQ ID NO: 1125 - protein, 192 aa, synthetic construct
MEASPASGPRHLMDPHTFYSNFNNKIGRHKTYLCYEVERLDNGTWVKMDQHRGFLHNQPRRHAELLFLDLVPSLQLDPAQIYRVTWFISWSPCFSWRGCACEVRAFLQENTHVRLRIFAARIADHWPLYKEALQMLRDAGAQVSIMTYDEFKHCWDTFVDHQGAPFQPWDGLDEHSQALSRRLRAILQNQGN

SEQ ID NO: 1126 - protein, 192 aa, synthetic construct
MEASPASGPRHLMDPHTFYSNFNNKIGRHKTYLCYEVERLDNGTWVKMDQHRGFLHNQPRRHAELLFLDLVPSLQLDPAQIYRVTWFISWSPCFSWSGCACEVRAFLQENTHVRLRIFAARIADHWPLYKEALQMLRDAGAQVSIMTYDEFKHCWDTFVDHQGAPFQPWDGLDEHSQALSRRLRAILQNQGN

SEQ ID NO: 1127 - protein, 192 aa, synthetic construct
MEASPASGPRHLMDPHTFYSNFNNKIGRHKTYLCYEVERLDNGTWVKMDQHRGFLHNQPRRHAELLFLDLVPSLQLDPAQIYRVTWFISWSPCFSWTGCACEVRAFLQENTHVRLRIFAARIADHWPLYKEALQMLRDAGAQVSIMTYDEFKHCWDTFVDHQGAPFQPWDGLDEHSQALSRRLRAILQNQGN

SEQ ID NO: 1128 - protein, 192 aa, synthetic construct
MEASPASGPRHLMDPHTFYSNFNNKIGRHKTYLCYEVERLDNGTWVKMDQHRGFLHNQPRRHAELLFLDLVPSLQLDPAQIYRVTWFISWSPCFSWVGCACEVRAFLQENTHVRLRIFAARIADHWPLYKEALQMLRDAGAQVSIMTYDEFKHCWDTFVDHQGAPFQPWDGLDEHSQALSRRLRAILQNQGN

SEQ ID NO: 1129 - protein, 192 aa, synthetic construct
MEASPASGPRHLMDPHTFYSNFNNKIGRHKTYLCYEVERLDNGTWVKMDQHRGFLHNQPRRHAELLFLDLVPSLQLDPAQIYRVTWFISWSPCFSWGWCACEVRAFLQENTHVRLRIFAARIADHWPLYKEALQMLRDAGAQVSIMTYDEFKHCWDTFVDHQGAPFQPWDGLDEHSQALSRRLRAILQNQGN

SEQ ID NO: 1130 - protein, 192 aa, synthetic construct
MEASPASGPRHLMDPHTFYSNFNNKIGRHKTYLCYEVERLDNGTWVKMDQHRGFLHNQPRRHAELLFLDLVPSLQLDPAQIYRVTWFISWSPCFSWYGCACEVRAFLQENTHVRLRIFAARIADHWPLYKEALQMLRDAGAQVSIMTYDEFKHCWDTFVDHQGAPFQPWDGLDEHSQALSRRLRAILQNQGN

SEQ ID NO: 1131 - protein, 191 aa, synthetic construct
MEASPASGPRHLMDPHTFYSNFNNKIGRHKTYLCYEVERLDNGTWVKMDQHRGFLHNQPRRHAELLFLDLVPSLQLDPAQIYRVTWFISWSPDFSCGCACEVRAFLQENTHVRLRIFAARIADHWPLYKEALQMLRDAGAQVSIMTYDEFKHCWDTFVDHQGAPFQPWDGLDEHSQALSRRLRAILQNQGN

SEQ ID NO: 1132 - protein, 191 aa, synthetic construct
MEASPASGPRHLMDPHTFYSNFNNKIGRHKTYLCYEVERLDNGTWVKMDQHRGFLHNQPRRHAELLFLDLVPSLQLDPAQIYRVTWFISWSPNFSCGCACEVRAFLQENTHVRLRIFAARIADHWPLYKEALQMLRDAGAQVSIMTYDEFKHCWDTFVDHQGAPFQPWDGLDEHSQALSRRLRAILQNQGN

SEQ ID NO: 1133 - protein, 191 aa, synthetic construct
MEASPASGPRHLMDPHTFYSNFNNKIGRHKTYLCYEVERLDNGTWVKMDQHRGFLHNQPRRHAELLFLDLVPSLQLDPAQIYRVTWFISWSPYFSCGCACEVRAFLQENTHVRLRIFAARIADHWPLYKEALQMLRDAGAQVSIMTYDEFKHCWDTFVDHQGAPFQPWDGLDEHSQALSRRLRAILQNQGN

SEQ ID NO: 1134 - protein, 191 aa, synthetic construct
MEASPASGPRHLMDPHTFYSNFNNKIGRHKTYLCYEVERLDNGTWVKMDQHRGFLHNQPRRHAELLFLDLVPSLQLDPAQIYRVTWFISWSPWFSCGCACEVRAFLQENTHVRLRIFAARIADHWPLYKEALQMLRDAGAQVSIMTYDEFKHCWDTFVDHQGAPFQPWDGLDEHSQALSRRLRAILQNQGN

SEQ ID NO: 1135 - protein, 191 aa, synthetic construct
MEASPASGPRHLMDPHTFYSNFNNKIGRHKTYLCYEVERLDNGTWVKMDQHRGFLHNQPRRHAELLFLDLVPSLQLDPAQIYRVTWFISWSPDFSHGCACEVRAFLQENTHVRLRIFAARIADHWPLYKEALQMLRDAGAQVSIMTYDEFKHCWDTFVDHQGAPFQPWDGLDEHSQALSRRLRAILQNQGN

SEQ ID NO: 1136 - protein, 191 aa, synthetic construct
MEASPASGPRHLMDPHTFYSNFNNKIGRHKTYLCYEVERLDNGTWVKMDQHRGFLHNQPRRHAELLFLDLVPSLQLDPAQIYRVTWFISWSPNFSHGCACEVRAFLQENTHVRLRIFAARIADHWPLYKEALQMLRDAGAQVSIMTYDEFKHCWDTFVDHQGAPFQPWDGLDEHSQALSRRLRAILQNQGN

SEQ ID NO: 1137 - protein, 191 aa, synthetic construct
MEASPASGPRHLMDPHTFYSNFNNKIGRHKTYLCYEVERLDNGTWVKMDQHRGFLHNQPRRHAELLFLDLVPSLQLDPAQIYRVTWFISWSPYFSHGCACEVRAFLQENTHVRLRIFAARIADHWPLYKEALQMLRDAGAQVSIMTYDEFKHCWDTFVDHQGAPFQPWDGLDEHSQALSRRLRAILQNQGN

SEQ ID NO: 1138 - protein, 191 aa, synthetic construct
MEASPASGPRHLMDPHTFYSNFNNKIGRHKTYLCYEVERLDNGTWVKMDQHRGFLHNQPRRHAELLFLDLVPSLQLDPAQIYRVTWFISWSPWFSHGCACEVRAFLQENTHVRLRIFAARIADHWPLYKEALQMLRDAGAQVSIMTYDEFKHCWDTFVDHQGAPFQPWDGLDEHSQALSRRLRAILQNQGN

SEQ ID NO: 1139 - protein, 191 aa, synthetic construct
MEASPASGPRHLMDPHTFYSNFNNKIGRHKTYLCYEVERLDNGTWVKMDQHRGFLHNQPRRHAELLFLDLVPSLQLDPAQIYRVTWFISWSPDFSDGCACEVRAFLQENTHVRLRIFAARIADHWPLYKEALQMLRDAGAQVSIMTYDEFKHCWDTFVDHQGAPFQPWDGLDEHSQALSRRLRAILQNQGN

SEQ ID NO: 1140 - protein, 191 aa, synthetic construct
MEASPASGPRHLMDPHTFYSNFNNKIGRHKTYLCYEVERLDNGTWVKMDQHRGFLHNQPRRHAELLFLDLVPSLQLDPAQIYRVTWFISWSPNFSDGCACEVRAFLQENTHVRLRIFAARIADHWPLYKEALQMLRDAGAQVSIMTYDEFKHCWDTFVDHQGAPFQPWDGLDEHSQALSRRLRAILQNQGN

SEQ ID NO: 1141 - protein, 191 aa, synthetic construct
MEASPASGPRHLMDPHTFYSNFNNKIGRHKTYLCYEVERLDNGTWVKMDQHRGFLHNQPRRHAELLFLDLVPSLQLDPAQIYRVTWFISWSPYFSDGCACEVRAFLQENTHVRLRIFAARIADHWPLYKEALQMLRDAGAQVSIMTYDEFKHCWDTFVDHQGAPFQPWDGLDEHSQALSRRLRAILQNQGN

SEQ ID NO: 1142 - protein, 191 aa, synthetic construct
MEASPASGPRHLMDPHTFYSNFNNKIGRHKTYLCYEVERLDNGTWVKMDQHRGFLHNQPRRHAELLFLDLVPSLQLDPAQIYRVTWFISWSPWFSDGCACEVRAFLQENTHVRLRIFAARIADHWPLYKEALQMLRDAGAQVSIMTYDEFKHCWDTFVDHQGAPFQPWDGLDEHSQALSRRLRAILQNQGN

SEQ ID NO: 1143 - protein, 191 aa, synthetic construct
MEASPASGPRHLMDPHTFYSNFNNKIGRHKTYLCYEVERLDNGTWVKMDQHRGFLHNQPRRHAELLFLDLVPSLQLDPAQIYRVTWFISWSPYFSCGCACEVRAFLQENTHVRLRIFAARIADHDPLYKEALQMLRDAGAQVSIMTYDEFKHCWDTFVDHQGAPFQPWDGLDEHSQALSRRLRAILQNQGN

SEQ ID NO: 1144 - protein, 191 aa, synthetic construct
MEASPASGPRHLMDPHTFYSNFNNKIGRHKTYLCYEVERLDNGTWVKMDQHRGFLHNQPRRHAELLFLDLVPSLQLDPAQIYRVTWFISWSPWFSCGCACEVRAFLQENTHVRLRIFAARIADHDPLYKEALQMLRDAGAQVSIMTYDEFKHCWDTFVDHQGAPFQPWDGLDEHSQALSRRLRAILQNQGN

SEQ ID NO: 1145 - protein, 189 aa, synthetic construct; identical to SEQ ID NO: 95

SEQ ID NO: 1146 - protein, 191 aa, synthetic construct
MEASPASGPRHLMDPHTFYSNFNNKIGRHKTYLCYEVERLDNGTWVKMDQHRGFLHNQPRRHAELLFLDLVPSLQLDPAQIYRVTWFISWSPCFSWGCVCEVRAFLQENTHVRLRIFAARIADHWPLYKEALQMLRDAGAQVSIMTYDEFKHCWDTFVDHQGAPFQPWDGLDEHSQALSRRLRAILQNQGN

SEQ ID NO: 1147 - protein, 191 aa, synthetic construct
MEASPASGPRHLMDPHTFYSNFNNKIGRHKTYLCYEVERLDNGTWVKMDQHRGFLHNQPRRHAELLFLDLVPSLQLDPAQIYRVTWFISWSPCFSWGCLCEVRAFLQENTHVRLRIFAARIADHWPLYKEALQMLRDAGAQVSIMTYDEFKHCWDTFVDHQGAPFQPWDGLDEHSQALSRRLRAILQNQGN

SEQ ID NO: 1148 - protein, 191 aa, synthetic construct
MEASPASGPRHLMDPHTFYSNFNNKIGRHKTYLCYEVERLDNGTWVKMDQHRGFLHNQPRRHAELLFLDLVPSLQLDPAQIYRVTWFISWSPCFSWGCSCEVRAFLQENTHVRLRIFAARIADHWPLYKEALQMLRDAGAQVSIMTYDEFKHCWDTFVDHQGAPFQPWDGLDEHSQALSRRLRAILQNQGN

SEQ ID NO: 1149 - protein, 191 aa, synthetic construct
MEASPASGPRHLMDPHTFYSNFNNKIGRHKTYLCYEVERLDNGTWVKMDQHRGFLHNQPRRHAELLFLDLVPSLQLDPAQIYRVTWFISWSPCFSWGCTCEVRAFLQENTHVRLRIFAARIADHWPLYKEALQMLRDAGAQVSIMTYDEFKHCWDTFVDHQGAPFQPWDGLDEHSQALSRRLRAILQNQGN

SEQ ID NO: 1150 - protein, 191 aa, synthetic construct
MEASPASGPRHLMDPHTFYSNFNNKIGRHKTYLCYEVERLDNGTWVKMDQHRGFLHNQPRRHAELLFLDLVPSLQLDPAQIYRVTWFISWSPCFSWGCFCEVRAFLQENTHVRLRIFAARIADHWPLYKEALQMLRDAGAQVSIMTYDEFKHCWDTFVDHQGAPFQPWDGLDEHSQALSRRLRAILQNQGN

SEQ ID NO: 1151 - protein, 191 aa, synthetic construct
MEASPASGPRHLMDPHTFYSNFNNKIGRHKTYLCYEVERLDNGTWVKMDQHRGFLHNQPRRHAELLFLDLVPSLQLDPAQIYRVTWFISWSPCFSWGCYCEVRAFLQENTHVRLRIFAARIADHWPLYKEALQMLRDAGAQVSIMTYDEFKHCWDTFVDHQGAPFQPWDGLDEHSQALSRRLRAILQNQGN

SEQ ID NO: 1152 - protein, 191 aa, synthetic construct
MEASPASGPRHLMDPHTFYSNFNNKIGRHKTYLCYEVERLDNGTWVKMDQHRGFLHNQPRRHAELLFLDLVPSLQLDPAQIYRVTWFISWSPCKSWGCFCEVRAFLQENTHVRLRIFAARIADHWPLYKEALQMLRDAGAQVSIMTYDEFKHCWDTFVDHQGAPFQPWDGLDEHSQALSRRLRADLQNQGN

SEQ ID NO: 1153 - protein, 191 aa, synthetic construct
MEASPASGPRHLMDPHTFYSNFNNKIGRHKTYLCYEVERLDNGTWVKMDQHRGFLHNQPRRHAELLFLDLVPSLQLDPAQIYRVTWFISWSPCKSWGCACEVRAFLQENTHVRLRIFAARIADHWPLYKEALQMLRDAGAQVSIMTYDEFKHCWDTFVDHQGAPFQPWDGLDEHSQALSRRLRADLQNQGN

SEQ ID NO: 1154 - protein, 191 aa, synthetic construct
MEASPASGPRHLMDPHTFYSNFNNKIGRHKTYLCYEVERLDNGTWVKMDQHRGFLHNQPRRHAELLFLDLVPSLQLDPAQIYRVTWFISWSPCFSWGCACEVRAFLQENTHVRLRIFAARIADHWPLYKEALQMLRDAGAQVSIMTYDEFKHCWDTFVDHQGAPFQPWDGLDEHSQALSRRLRADLQNQGN

SEQ ID NO: 1155 - protein, 191 aa, synthetic construct
MEASPASGPRHLMDPHTFYSNFNNKIGRHKTYLCYEVERLDNGTWVKMDQHRGFLHNQPRRHAELLFLDLVPSLQLDPAQIYRVTWFISWSPCFSWGCACEVRAFLQENTHVRLRIFAARIADHWPLYKEALQMLRDAGAQVSIMTYDEFKHCWDTFVDHQGAPFQPWDGLDEHSQALSRRLRAIDQNQGN

SEQ ID NO: 1156 - skipped

SEQ ID NO: 1157 - protein, 191 aa, synthetic construct
MEASPASGPRHLMDPHTFYSNFNNKIGRHKTYLCYEVERLDNGTWVKMDQHRGFLHNQPRRHAELLFLDLVPSLQLDPAQIYRVTWFISWSPCFSWGCACEVRAFLQENTHVRLRIFAARIADHWPLYKEFLQMLRDAGAQVSIMTYDEFKHCWDTFVDHQGAPFQPWDGLDEHSQALSRRLRAILQNQGN

SEQ ID NO: 1158 - protein, 191 aa, synthetic construct
MEASPASGPRHLMDPHTFYSNFNNKIGRHKTYLCYEVERLDNGTWVKMDQHRGFLHNQPRRHAELLFLDLVPSLQLDPAQIYRVTWFISWSPCFSWGCACEVRAFLQENTHVRLRIFAARIADHWPLYKESLQMLRDAGAQVSIMTYDEFKHCWDTFVDHQGAPFQPWDGLDEHSQALSRRLRAILQNQGN

SEQ ID NO: 1159 - protein, 191 aa, synthetic construct
MEASPASGPRHLMDPHTFYSNFNNKIGRHKTYLCYEVERLDNGTWVKMDQHRGFLHNQPRRHAELLFLDLVPSLQLDPAQIYRVTWFISWSPCFSWGCACEVRAFLQENTHVRLRIFAARIADHWPLYKETLQMLRDAGAQVSIMTYDEFKHCWDTFVDHQGAPFQPWDGLDEHSQALSRRLRAILQNQGN

SEQ ID NO: 1160 - protein, 191 aa, synthetic construct
MEASPASGPRHLMDPHTFYSNFNNKIGRHKTYLCYEVERLDNGTWVKMDQHRGFLHNQPRRHAELLFLDLVPSLQLDPAQIYRVTWFISWSPCFSWGCACEVRAFLQENTHVRLRIFAARIADHWPLYKEYLQMLRDAGAQVSIMTYDEFKHCWDTFVDHQGAPFQPWDGLDEHSQALSRRLRAILQNQGN

SEQ ID NO: 1161 - skipped

SEQ ID NO: 1162 - protein, 191 aa, synthetic construct
MEASPASGPRHLMDPHTFYSNFNNKIGRHKTYLCYEVERLDNGTWVKMDQHRGFLHDQPRRHAELLFLDLVPSLQLDPAQIYRVTWFISWSPCFSWGCACEVRAFLQENTHVRLRIFAARIADHWPLYKEALQMLRDAGAQVSIMTYDEFKHCWDTFVDHQGAPFQPWDGLDEHSQALSRRLRAILQNQGN

SEQ ID NO: 1163 - protein, 191 aa, synthetic construct
MEASPASGPRHLMDPHTFYSNFNNKIGRHKTYLCYEVERLDNGTWVKMDQHRGFLHNEPRRHAELLFLDLVPSLQLDPAQIYRVTWFISWSPCFSWGCACEVRAFLQENTHVRLRIFAARIADHWPLYKEALQMLRDAGAQVSIMTYDEFKHCWDTFVDHQGAPFQPWDGLDEHSQALSRRLRAILQNQGN

SEQ ID NO: 1164 - protein, 191 aa, synthetic construct
MEASPASGPRHLMDPHTFYSNFNNKIGRHKTYLCYEVERLDNGTWVKMDQHRGFLHNQPRRHAELLFLDLVPSLQLDPAQIYRVTWFISWSPCFSWGCACKVRAFLQENTHVRLRIFAARIADHWPLYKEALQMLRDAGAQVSIMTYDEFKHCWDTFVDHQGAPFQPWDGLDEHSQALSRRLRAILQNQGN

SEQ ID NO: 1165 - protein, 191 aa, synthetic construct
MEASPASGPRHLMDPHTFYSNFNNKIGRHKTYLCYEVERLDNGTWVKMDQHRGFLHNQPRRHAELLFLDLVPSLQLDPAQIYRVTWFISWSPCFSWGCACHVRAFLQENTHVRLRIFAARIADHWPLYKEALQMLRDAGAQVSIMTYDEFKHCWDTFVDHQGAPFQPWDGLDEHSQALSRRLRAILQNQGN

SEQ ID NO: 1166 - skipped

SEQ ID NO: 1167 - protein, 191 aa, synthetic construct
MEASPASGPRHLMDPHTFYSNFNNKIGRHKTYLCYEVERLDNGTWVKMDQHRGFLHNQPRRHAELLFLDLVPSLQLDPAQIYRVTWFISWSPCFSWGCACFVRAFLQENTHVRLRIFAARIADHWPLYKEALQMLRDAGAQVSIMTYDEFKHCWDTFVDHQGAPFQPWDGLDEHSQALSRRLRAILQNQGN

SEQ ID NO: 1168 - protein, 191 aa, synthetic construct
MEASPASGPRHLMDPHTFYSNFNNKIGRHKTYLCYEVERLDNGTWVKMDQHRGFLHNQPRRHAELLFLDLVPSLQLDPAQIYRVTWFISWSPCFSWGCACQVRAFLQENTHVRLRIFAARIADHWPLYKEALQMLRDAGAQVSIMTYDEFKHCWDTFVDHQGAPFQPWDGLDEHSQALSRRLRAILQNQGN

SEQ ID NO: 1169 - protein, 191 aa, synthetic construct
MEASPASGPRHLMDPHTFYSNFNNKIGRHKTYLCYEVERLDNGTWVKMDQHRGFLHNQPRRHAELLFLDLVPSLQLDPAQIYRVTWFISWSPCFSWGCACAVRAFLQENTHVRLRIFAARIADHWPLYKEALQMLRDAGAQVSIMTYDEFKHCWDTFVDHQGAPFQPWDGLDEHSQALSRRLRAILQNQGN

SEQ ID NO: 1170 - protein, 191 aa, synthetic construct
MEASPASGPRHLMDPHTFYSNFNNKIGRHKTYLCYEVERLDNGTWVKMDQHRGFLHNQPRRHAELLFLDLVPSLQLDPAQIYRVTWFISWSPCFSWGCACEVREFLQENTHVRLRIFAARIADHWPLYKEALQMLRDAGAQVSIMTYDEFKHCWDTFVDHQGAPFQPWDGLDEHSQALSRRLRAILQNQGN

SEQ ID NO: 1171 - protein, 191 aa, synthetic construct
MEASPASGPRHLMDPHTFYSNFNNKIGRHKTYLCYEVERLDNGTWVKMDQHRGFLHNQPRRHAELLFLDLVPSLQLDPAQIYRVTWFISWSPCFSWGCACEVRQFLQENTHVRLRIFAARIADHWPLYKEALQMLRDAGAQVSIMTYDEFKHCWDTFVDHQGAPFQPWDGLDEHSQALSRRLRAILQNQGN

SEQ ID NO: 1172 - protein, 191 aa, synthetic construct
MEASPASGPRHLMDPHTFYSNFNNKIGRHKTYLCYEVERLDNGTWVKMDQHRGFLHNQPRRHAELLFLDLVPSLQLDPAQIYRVTWFISWSPCFSWGCACEVRKFLQENTHVRLRIFAARIADHWPLYKEALQMLRDAGAQVSIMTYDEFKHCWDTFVDHQGAPFQPWDGLDEHSQALSRRLRAILQNQGN

SEQ ID NO: 1173 - protein, 191 aa, synthetic construct
MEASPASGPRHLMDPHTFYSNFNNKIGRHKTYLCYEVERLDNGTWVKMDQHRGFLHNQPRRHAELLFLDLVPSLQLDPAQIYRVTWFISWSPCFSWGCACEVRLFLQENTHVRLRIFAARIADHWPLYKEALQMLRDAGAQVSIMTYDEFKHCWDTFVDHQGAPFQPWDGLDEHSQALSRRLRAILQNQGN

SEQ ID NO: 1174 - protein, 191 aa, synthetic construct
MEASPASGPRHLMDPHTFYSNFNNKIGRHKTYLCYEVERLDNGTWVKMDQHRGFLHNQPRRHAELLFLDLVPSLQLDPAQIYRVTWFISWSPCFSWGCACEVTAFLQENTHVRLRIFAARIADHWPLYKEALQMLRDAGAQVSIMTYDEFKHCWDTFVDHQGAPFQPWDGLDEHSQALSRRLRAILQNQGN

SEQ ID NO: 1175 - protein, 191 aa, synthetic construct
MEASPASGPRHLMDPHTFYSNFNNKIGRHKTYLCYEVERLDNGTWVKMDQHRGFLHNQPRRHAELLFLDLVPSLQLDPAQIYRVTWFISWSPCFSWGCACEVFAFLQENTHVRLRIFAARIADHWPLYKEALQMLRDAGAQVSIMTYDEFKHCWDTFVDHQGAPFQPWDGLDEHSQALSRRLRAILQNQGN

SEQ ID NO: 1176 - protein, 191 aa, synthetic construct
MEASPASGPRHLMDPHTFYSNFNNKIGRHKTYLCYEVERLDNGTWVKMDQHRGFLHNQPRRHAELLFLDLVPSLQLDPAQIYRVTWFISWSPCFSWGCACEVRAFLQENTHVRLRIFAARIADHWPLAKEALQMLRDAGAQVSIMTYDEFKHCWDTFVDHQGAPFQPWDGLDEHSQALSRRLRAILQNQGN

SEQ ID NO: 1177 - protein, 191 aa, synthetic construct
MEASPASGPRHLMDPHTFYSNFNNKIGRHKTYLCYEVERLDNGTWVKMDQHRGFLHNQPRRHAELLFLDLVPSLQLDPAQIYRVTWFISWSPCFSWGCACEVRAFLQENTHVRLRIFAARIADHWPLEKEALQMLRDAGAQVSIMTYDEFKHCWDTFVDHQGAPFQPWDGLDEHSQALSRRLRAILQNQGN

SEQ ID NO: 1178 - protein, 191 aa, synthetic construct
MEASPASGPRHLMDPHTFYSNFNNKIGRHKTYLCYEVERLDNGTWVKMDQHRGFLHNQPRRHAELLFLDLVPSLQLDPAQIYRVTWFISWSPCFSWGCACEVRAFLQENTHVRLRIFAARIADHWPLQKEALQMLRDAGAQVSIMTYDEFKHCWDTFVDHQGAPFQPWDGLDEHSQALSRRLRAILQNQGN

SEQ ID NO: 1179 - protein, 191 aa, synthetic construct
MEASPASGPRHLMDPHTFYSNFNNKIGRHKTYLCYEVERLDNGTWVKMDQHRGFLHNQPRRHAELLFLDLVPSLQLDPAQIYRVTWFISWSPCFSWGCACEVRAFLQENTHVRLRIFAARIADHWPLLKEALQMLRDAGAQVSIMTYDEFKHCWDTFVDHQGAPFQPWDGLDEHSQALSRRLRAILQNQGN

SEQ ID NO: 1180 - protein, 191 aa, synthetic construct
MEASPASGPRHLMDPHTFYSNFNNKIGRHKTYLCYEVERLDNGTWVKMDQHRGFLHNQPRRHAELLFLDLVPSLQLDPAQIYRVTWFISWSPCFSWGCACEVRAFLQENTHVRLRIFAARIADHWPLFKEALQMLRDAGAQVSIMTYDEFKHCWDTFVDHQGAPFQPWDGLDEHSQALSRRLRAILQNQGN

SEQ ID NO: 1181 - protein, 191 aa, synthetic construct
MEASPASGPRHLMDPHTFYSNFNNKIGRHKTYLCYEVERLDNGTWVKMDQHRGFLHNQPRRHAELLFLDLVPSLQLDPAQIYRVTWFISWSPCFSWGCACEVRAFLQENTHVRLRIFAARIADHWPLEKEALQMLRDAGAQVSIMTYDEFKHCWDTFVDHQGAPFQPWDGLDEHSQALSRRLRADLQNQGN

SEQ ID NO: 1182 - protein, 189 aa, synthetic construct
MEASPASGPRHLMDPHTFYSNFNNKIGRHKTYLCYEVERLDNGTWVKMDQHRGFLHNQPRRHAELLFLDLVPSLQLDPAQIYRVTWFISWSPCAGCACEVRAFLQENTHVRLRIFAARIADHWPLYKEALQMLRDAGAQVSIMTYDEFKHCWDTFVDHQGAPFQPWDGLDEHSQALSRRLRAILQNQGN

SEQ ID NO: 1183 - protein, 191 aa, synthetic construct
MEASPASGPRHLMDPHTFYSNFNNKIGRHKTYLCYEVERLDNGTWVKMDQHRGFLHNQPRRHAELLFLDLVPSLQLDPAQIYRVTWFISWSPCASWACACEVRAFLQENTHVRLRIFAARIADHWPLYKEALQMLRDAGAQVSIMTYDEFKHCWDTFVDHQGAPFQPWDGLDEHSQALSRRLRAILQNQGN

SEQ ID NO: 1184 - protein, 189 aa, synthetic construct
MEASPASGPRHLMDPHTFYSNFNNKIGRHKTYLCYEVERLDNGTWVKMDQHRGFLHNQPRRHAELLFLDLVPSLQLDPAQIYRVTWFISWSPCAACACEVRAFLQENTHVRLRIFAARIADHWPLYKEALQMLRDAGAQVSIMTYDEFKHCWDTFVDHQGAPFQPWDGLDEHSQALSRRLRAILQNQGN

SEQ ID NO: 1185 - protein, 191 aa, synthetic construct
MEASPASGPRHLMDPHTFYSNFNNKIGRHKTYLCYEVERLDNGTWVKMDQHRGFLHNQPRRHAELLFLDLVPSLQLDPAQIYRVTWFISWSPCYSWDCACEVRAFLQENTHVRLRIFAARIADHWPLYKEALQMLRDAGAQVSIMTYDEFKHCWDTFVDHQGAPFQPWDGLDEHSQALSRRLRAILQNQGN

SEQ ID NO: 1186 - protein, 191 aa, synthetic construct
MEASPASGPRHLMDPHTFYSNFNNKIGRHKTYLCYEVERLDNGTWVKMDQHRGFLHNQPRRHAELLFLDLVPSLQLDPAQIYRVTWFISWSPCYSWDCAREVRAFLQENTHVRLRIFAARIADHWPLYKEALQMLRDAGAQVSIMTYDEFKHCWDTFVDHQGAPFQPWDGLDEHSQALSRRLRAILQNQGN

SEQ ID NO: 1187 - protein, 191 aa, synthetic construct
MEASPASGPRHLMDPHTFYSNFNNKIGRHKTYLCYEVERLDNGTWVKMDQHRGFLHNQPRRHAELLFLDLVPSLQLDPAQIYRVTWFISWSPCASWGCACELRAFLQENTHVRLRIFAARIADHWPLYKEALQMLRDAGAQVSIMTYDEFKHCWDTFVDHQGAPFQPWDGLDEHSQALSRRLRAILQNQGN

SEQ ID NO: 1188 - protein, 191 aa, synthetic construct
MEASPASGPRHLMDPHTFYSNFNNKIGRHKTYLCYEVERLDNGTWVKMDQHRGFLHNQPRRHAELLFLDLVPSLQLDPAQIYRVTWFISWSPCASWGCACEVAAFLQENTHVRLRIFAARIADHWPLYKEALQMLRDAGAQVSIMTYDEFKHCWDTFVDHQGAPFQPWDGLDEHSQALSRRLRAILQNQGN

SEQ ID NO: 1189 - protein, 191 aa, synthetic construct
MEASPASGPRHLMDPHTFYSNFNNKIGRHKTYLCYEVERLDNGTWVKMDQHRGFLHNQPRRHAELLFLDLVPSLQLDPAQIYRVTWFISWSPCFSWACACKVRAFLQENTHVRLRIFAARIADHWPLYKEALQMLRDAGAQVSIMTYDEFKHCWDTFVDHQGAPFQPWDGLDEHSQALSRRLRAILQNQGN

SEQ ID NO: 1190 - protein, 191 aa, synthetic construct
MEASPASGPRHLMDPHTFYSNFNNKIGRHKTYLCYEVERLDNGTWVKMDQHRGFLHNQPRRHAELLFLDLVPSLQLDPAQIYRVTWFISWSPCFSWDCACEVRAFLQENTHVRLRIFAARIADHWPLYKEALQRLRDAGAQVSIMTYDEFKHCWDTFVDHQGAPFQPWDGLDEHSQALSRRLRAILQNQGN

SEQ ID NO: 1191 - protein, 191 aa, synthetic construct
MEASPASGPRHLMDPHTFYSNFNNKIGRHKTYLCYEVERLDNGTWVKMDQHRGFLHNQPRRHAELLFLDLVPSLQLDPAQIYRVTWFISWSPCASWGCSCEVRAFLQENTHVRLRIFAARIADHWPLYKEALQMLRDAGAQVSIMTYDEFKHCWDTFVDHQGAPFQPWDGLDEHSQALSRRLRAILQNQGN

SEQ ID NO: 1192 - protein, 191 aa, synthetic construct
MEASPASGPRHLMDPHTFYSNFNNKIGRHKTYLCYEVERLDNGTWVKMDQHRGFLHNQPRRHAELLFLDLVPSLQLDPAQIYRVTWFISWSPCFSWNCSCEVRAFLQENTHVRLRIFAARIADHWPLYKEALQMLRDAGAQVSIMTYDEFKHCWDTFVDHQGAPFQPWDGLDEHSQALSRRLRAILQNQGN

SEQ ID NO: 1193 - protein, 191 aa, synthetic construct
MEASPASGPRHLMDPHTFYSNFNNKIGRHKTYLCYEVERLDNGTWVKMDQHRGFLHNQPRRHAELLFLDLVPSLQLDPAQIYRVTWFISWSPCFSWGCSCRVRAFLQENTHVRLRIFAARIADHWPLYKEALQMLRDAGAQVSIMTYDEFKHCWDTFVDHQGAPFQPWDGLDEHSQALSRRLRAILQNQGN

SEQ ID NO: 1194 - protein, 191 aa, synthetic construct
MEASPASGPRHLMDPHTFYSNFNNKIGRHKTYLCYEVERLDNGTWVKMDQHRGFLHNQPRRHAELLFLDLVPSLQLDPAQIYRVTWFISWSPCFSWGCSCELRAFLQENTHVRLRIFAARIADHWPLYKEALQMLRDAGAQVSIMTYDEFKHCWDTFVDHQGAPFQPWDGLDEHSQALSRRLRAILQNQGN

SEQ ID NO: 1195 - protein, 191 aa, synthetic construct
MEASPASGPRHLMDPHTFYSNFNNKIGRHKTYLCYEVERLDNGTWVKMDQHRGFLHNQPRRHAELLFLDLVPSLQLDPAQIYRVTWFISWSPCFSWGCSCEVRQFLQENTHVRLRIFAARIADHWPLYKEALQMLRDAGAQVSIMTYDEFKHCWDTFVDHQGAPFQPWDGLDEHSQALSRRLRAILQNQGN

SEQ ID NO: 1196 - protein, 191 aa, synthetic construct
MEASPASGPRHLMDPHTFYSNFNNKIGRHKTYLCYEVERLDNGTWVKMDQHRGFLHNQPRRHAELLFLDLVPSLQLDPAQIYRVTWFISWSPCFSWGCSCEVRAFLSENTHVRLRIFAARIADHWPLYKEALQMLRDAGAQVSIMTYDEFKHCWDTFVDHQGAPFQPWDGLDEHSQALSRRLRAILQNQGN

SEQ ID NO: 1197 - protein, 191 aa, synthetic construct
MEASPASGPRHLMDPHTFYSNFNNKIGRHKTYLCYEVERLDNGTWVKMDQHRGFLHNQPRRHAELLFLDLVPSLQLDPAQIYRVTWFISWSPCFSWGCSCEVRAFLQENTHVRLRIFAARIADHWPLEKEALQMLRDAGAQVSIMTYDEFKHCWDTFVDHQGAPFQPWDGLDEHSQALSRRLRAILQNQGN

SEQ ID NO: 1198 - protein, 191 aa, synthetic construct
MEASPASGPRHLMDPHTFYSNFNNKIGRHKTYLCYEVERLDNGTWVKMDQHRGFLHNQPRRHAELLFLDLVPSLQLDPAQIYRVTWFISWSPCFSWGCSCEVRAFLQENTHVRLRIFAARIADHWPLYKEALQMLKDAGAQVSIMTYDEFKHCWDTFVDHQGAPFQPWDGLDEHSQALSRRLRAILQNQGN

SEQ ID NO: 1199 - protein, 191 aa, synthetic construct
MEASPASGPRHLMDPHTFYSNFNNKIGRHKTYLCYEVERLDNGTWVKMDQHRGFLHNQPRRHAELLFLDLVPSLQLDPAQIYRVTWFISWSPCFSWGCACKLAEFLQENTHVRLRIFAARIADHWPLYKEALQMLRDAGAQVSIMTYDEFKHCWDTFVDHQGAPFQPWDGLDEHSQALSRRLRAILQNQGN

SEQ ID NO: 1200 - protein, 191 aa, synthetic construct
MEASPASGPRHLMDPHTFYSNFNNKIGRHKTYLCYEVERLDNGTWVKMDQHRGFLHNQPRRHAELLFLDLVPSLQLDPAQIYRVTWFISWSPCFSWGCACKVAEFLQENTHVRLRIFAARIADHWPLYKEALQMLRDAGAQVSIMTYDEFKHCWDTFVDHQGAPFQPWDGLDEHSQALSRRLRAILQNQGN

SEQ ID NO: 1201 - protein, 191 aa, synthetic construct
MEASPASGPRHLMDPHTFYSNFNNKIGRHKTYLCYEVERLDNGTWVKMDQHRGFLHNQPRRHAELLFLDLVPSLQLDPAQIYRVTWFISWSPCFSWGCACKVRAFLQENTHVRLRIFAARIADHWPLIKEALQMLRDAGAQVSIMTYDEFKHCWDTFVDHQGAPFQPWDGLDEHSQALSRRLRAILQNQGN

SEQ ID NO: 1202 - protein, 191 aa, synthetic construct
MEASPASGPRHLMDPHTFYSNFNNKIGRHKTYLCYEVERLDNGTWVKMDQHRGFLHNQPRRHAELLFLDLVPSLQLDPAQIYRVTWFISWSPCFSWGCACKVRAFLQENTHVRLRIFAARIADHWPLYKEGLQMLRDAGAQVSIMTYDEFKHCWDTFVDHQGAPFQPWDGLDEHSQALSRRLRAILQNQGN

SEQ ID NO: 1203 - protein, 191 aa, synthetic construct
MEASPASGPRHLMDPHTFYSNFNNKIGRHKTYLCYEVERLDNGTWVKMDQHRGFLHNQPRRHAELLFLDLVPSLQLDPAQIYRVTWFISWSPCFSWGCACEVAAFLQENTHVRLRIFAARIADHWPLYKEGLQMLRDAGAQVSIMTYDEFKHCWDTFVDHQGAPFQPWDGLDEHSQALSRRLRAILQNQGN

SEQ ID NO: 1204 - protein, 191 aa, synthetic construct
MEASPASGPRHLMDPHTFYSNFNNKIGRHKTYLCYEVERLDNGTWVKMDQHRGFLHNQPRRHAELLFLDLVPSLQLDPAQIYRVTWFISWSPCFSWGCACKVAAFLQENTHVRLRIFAARIADHWPLIKEGLQMLRDAGAQVSIMTYDEFKHCWDTFVDHQGAPFQPWDGLDEHSQALSRRLRAILQNQGN

SEQ ID NO: 1205 - protein, 191 aa, synthetic construct
MEASPASGPRHLMDPHTFYSNFNNKIGRHKTYLCYEVERLDNGTWVKMDQHRGFLHNQPRRHAELLFLDLVPSLQLDPAQIYRVTWFISWSPCFSWGCACEVREFLQENTHVRLRIFAARIADHWPLYKAALQMLRDAGAQVSIMTYDEFKHCWDTFVDHQGAPFQPWDGLDEHSQALSRRLRAILQNQGN

SEQ ID NO: 1206 - protein, 191 aa, synthetic construct
MEASPASGPRHLMDPHTFYSNFNNKIGRHKTYLCYEVERLDNGTWVKMDQHRGFLHNQPRRHAELLFLDLVPSLQLDPAQIYRVTWFISWSPCFSWGCACEVREFLQENTHVRLRIFAARIADHWPLYKEGLQMLRDAGAQVSIMTYDEFKHCWDTFVDHQGAPFQPWDGLDEHSQALSRRLRAILQNQGN

SEQ ID NO: 1207 - protein, 191 aa, synthetic construct
MEASPASGPRHLMDPHTFYSNFNNKIGRHKTYLCYEVERLDNGTWVKMDQHRGFLHNQPRRHAELLFLDLVPSLQLDPAQIYRVTWFISWSPCFSWGCACEVREFLQENTHVRLRIFAARIADHWPLYKEALQRLRDAGAQVSIMTYDEFKHCWDTFVDHQGAPFQPWDGLDEHSQALSRRLRAILQNQGN

SEQ ID NO: 1208 - protein, 191 aa, synthetic construct
MEASPASGPRHLMDPHTFYSNFNNKIGRHKTYLCYEVERLDNGTWVKMDQHRGFLHNQPRRHAELLFLDLVPSLQLDPAQIYRVTWFISWSPCFSWGCACEVREFLQENTHVRLRIFAARIADHWPLYKAGLQRLRDAGAQVSIMTYDEFKHCWDTFVDHQGAPFQPWDGLDEHSQALSRRLRAILQNQGN

SEQ ID NO: 1209 - protein, 191 aa, synthetic construct
MEASPASGPRHLMDPHTFYSNFNNKIGRHKTYLCYEVERLDNGTWVKMDQHRGFLHNQPRRHAELLFLDLVPSLQLDPAQIYRVTWFISWSPCFSWGCACEVRAFLQENTHVRLRIFAARIADHWPLYKEALQMLHDAGAQVSIMTYDEFKHCWDTFVDHQGAPFQPWDGLDEHSQALSRRLRAILQNQGN

SEQ ID NO: 1210 - skipped

SEQ ID NO: 1211 - protein, 191 aa, synthetic construct
MEASPASGPRHLMDPHTFYSNFNNKIGRHKTYLCYEVERLDNGTWVKMDQHRGFLHNQPRRHAELLFLDLVPSLQLDPAQIYRVTWFISWSPCFSWGCACEVRAFLQENTHVRLRIFAARIADHWPLYQEALQMLRDAGAQVSIMTYDEFKHCWDTFVDHQGAPFQPWDGLDEHSQALSRRLRAILQNQGN

SEQ ID NO: 1212 - protein, 191 aa, synthetic construct
MEASPASGPRHLMDPHTFYSNFNNKIGRHKTYLCYEVERLDNGTWVKMDQHRGFLHNQPRRHAELLFLDLVPSLQLDPAQIYRVTWFISWSPCFSWGCACEVRAFLQENTHVRLRIFAARIADHWPLYKEALRMLRRAGAQVSIMTYDEFKHCWDTFVDHQGAPFQPWDGLDEHSQALSRRLRAILQNQGN

SEQ ID NO: 1213 - protein, 191 aa, synthetic construct
MEASPASGPRHLMDPHTFYSNFNNKIGRHKTYLCYEVERLDNGTWVKMDQHRGFLHNQPRRHAELLFLDLVPSLQLDPAQIYRVTWFISWSPCFSWGCACEVRAFLQENTHVRLRIFAARIADHWPLYKEALRMLHDAGAQVSIMTYDEFKHCWDTFVDHQGAPFQPWDGLDEHSQALSRRLRAILQNQGN

SEQ ID NO: 1214 - protein, 191 aa, synthetic construct
MEASPASGPRHLMDPHTFYSNFNNKIGRHKTYLCYEVERLDNGTWVKMDQHRGFLHNQPRRHAELLFLDLVPSLQLDPAQIYRVTWFISWSPCFSWGCACEVRAFLQENTHVRLRIFAARIADHWPLYKEALQRLRRAGAQVSIMTYDEFKHCWDTFVDHQGAPFQPWDGLDEHSQALSRRLRAILQNQGN

SEQ ID NO: 1215 - protein, 189 aa, synthetic construct
MEASPASGPRHLMDPHTFYSNFNNKIGRHKTYLCYEVERLDNGTWVKMDQHRGFLHNQPRRHAELLFLDLVPSLQLDPAQIYRVTWFISWSPCFSCVCEVRAFLQENTHVRLRIFAARIADHWPLYKEALQMLRDAGAQVSIMTYDEFKHCWDTFVDHQGAPFQPWDGLDEHSQALSRRLRAILQNQGN

SEQ ID NO: 1216 - protein, 189 aa, synthetic construct
MEASPASGPRHLMDPHTFYSNFNNKIGRHKTYLCYEVERLDNGTWVKMDQHRGFLHNQPRRHAELLFLDLVPSLQLDPAQIYRVTWFISWSPCFSCLCEVRAFLQENTHVRLRIFAARIADHWPLYKEALQMLRDAGAQVSIMTYDEFKHCWDTFVDHQGAPFQPWDGLDEHSQALSRRLRAILQNQGN

SEQ ID NO: 1217 - protein, 189 aa, synthetic construct
MEASPASGPRHLMDPHTFYSNFNNKIGRHKTYLCYEVERLDNGTWVKMDQHRGFLHNQPRRHAELLFLDLVPSLQLDPAQIYRVTWFISWSPCFSCSCEVRAFLQENTHVRLRIFAARIADHWPLYKEALQMLRDAGAQVSIMTYDEFKHCWDTFVDHQGAPFQPWDGLDEHSQALSRRLRAILQNQGN

SEQ ID NO: 1218 - protein, 189 aa, synthetic construct
MEASPASGPRHLMDPHTFYSNFNNKIGRHKTYLCYEVERLDNGTWVKMDQHRGFLHNQPRRHAELLFLDLVPSLQLDPAQIYRVTWFISWSPCFSCTCEVRAFLQENTHVRLRIFAARIADHWPLYKEALQMLRDAGAQVSIMTYDEFKHCWDTFVDHQGAPFQPWDGLDEHSQALSRRLRAILQNQGN

SEQ ID NO: 1219 - protein, 189 aa, synthetic construct
MEASPASGPRHLMDPHTFYSNFNNKIGRHKTYLCYEVERLDNGTWVKMDQHRGFLHNQPRRHAELLFLDLVPSLQLDPAQIYRVTWFISWSPCFSCFCEVRAFLQENTHVRLRIFAARIADHWPLYKEALQMLRDAGAQVSIMTYDEFKHCWDTFVDHQGAPFQPWDGLDEHSQALSRRLRAILQNQGN

SEQ ID NO: 1220 - protein, 189 aa, synthetic construct
MEASPASGPRHLMDPHTFYSNFNNKIGRHKTYLCYEVERLDNGTWVKMDQHRGFLHNQPRRHAELLFLDLVPSLQLDPAQIYRVTWFISWSPCFSCYCEVRAFLQENTHVRLRIFAARIADHWPLYKEALQMLRDAGAQVSIMTYDEFKHCWDTFVDHQGAPFQPWDGLDEHSQALSRRLRAILQNQGN

SEQ ID NO: 1221 - protein, 189 aa, synthetic construct
MEASPASGPRHLMDPHTFYSNFNNKIGRHKTYLCYEVERLDNGTWVKMDQHRGFLHNQPRRHAELLFLDLVPSLQLDPAQIYRVTWFISWSPCKSCFCEVRAFLQENTHVRLRIFAARIADHWPLYKEALQMLRDAGAQVSIMTYDEFKHCWDTFVDHQGAPFQPWDGLDEHSQALSRRLRADLQNQGN

SEQ ID NO: 1222 - protein, 189 aa, synthetic construct
MEASPASGPRHLMDPHTFYSNFNNKIGRHKTYLCYEVERLDNGTWVKMDQHRGFLHNQPRRHAELLFLDLVPSLQLDPAQIYRVTWFISWSPCFSCACEVRAFLQENTHVRLRIFAARIADHWPLYKEVLQMLRDAGAQVSIMTYDEFKHCWDTFVDHQGAPFQPWDGLDEHSQALSRRLRAILQNQGN

SEQ ID NO: 1223 - protein, 189 aa, synthetic construct
MEASPASGPRHLMDPHTFYSNFNNKIGRHKTYLCYEVERLDNGTWVKMDQHRGFLHNQPRRHAELLFLDLVPSLQLDPAQIYRVTWFISWSPCFSCACEVRAFLQENTHVRLRIFAARIADHWPLYKEFLQMLRDAGAQVSIMTYDEFKHCWDTFVDHQGAPFQPWDGLDEHSQALSRRLRAILQNQGN

SEQ ID NO: 1224 - protein, 189 aa, synthetic construct
MEASPASGPRHLMDPHTFYSNFNNKIGRHKTYLCYEVERLDNGTWVKMDQHRGFLHNQPRRHAELLFLDLVPSLQLDPAQIYRVTWFISWSPCFSCACEVRAFLQENTHVRLRIFAARIADHWPLYKESLQMLRDAGAQVSIMTYDEFKHCWDTFVDHQGAPFQPWDGLDEHSQALSRRLRAILQNQGN

SEQ ID NO: 1225 - protein, 189 aa, synthetic construct
MEASPASGPRHLMDPHTFYSNFNNKIGRHKTYLCYEVERLDNGTWVKMDQHRGFLHNQPRRHAELLFLDLVPSLQLDPAQIYRVTWFISWSPCFSCACEVRAFLQENTHVRLRIFAARIADHWPLYKETLQMLRDAGAQVSIMTYDEFKHCWDTFVDHQGAPFQPWDGLDEHSQALSRRLRAILQNQGN

SEQ ID NO: 1226 - protein, 189 aa, synthetic construct
MEASPASGPRHLMDPHTFYSNFNNKIGRHKTYLCYEVERLDNGTWVKMDQHRGFLHNQPRRHAELLFLDLVPSLQLDPAQIYRVTWFISWSPCFSCACEVRAFLQENTHVRLRIFAARIADHWPLYKEYLQMLRDAGAQVSIMTYDEFKHCWDTFVDHQGAPFQPWDGLDEHSQALSRRLRAILQNQGN

SEQ ID NO: 1227 - protein, 189 aa, synthetic construct
MEASPASGPRHLMDPHTFYSNFNNKIGRHKTYLCYEVERLDNGTWVKMDQHRGFLHNQPRRHAELLFLDLVPSLQLDPAQIYRVTWFISWSPCFSCACEVRAFLQENTHVRLRIFAARIADHWPLYKEGLQMLRDAGAQVSIMTYDEFKHCWDTFVDHQGAPFQPWDGLDEHSQALSRRLRAILQNQGN

SEQ ID NO: 1228 - protein, 189 aa, synthetic construct
MEASPASGPRHLMDPHTFYSNFNNKIGRHKTYLCYEVERLDNGTWVKMDQHRGFLHNQPRRHAELLFLDLVPSLQLDPAQIYRVTWFISWSPCASCACEVRAFLQENTHVRLRIFAARIADHWPLYKEALQMLRDAGAQVSIMTYDEFKHCWDTFVDHQGAPFQPWDGLDEHSQALSRRLRAILQNQGN

SEQ ID NO: 1229 - protein, 189 aa, synthetic construct
MEASPASGPRHLMDPHTFYSNFNNKIGRHKTYLCYEVERLDNGTWVKMDQHRGFLHNQPRRHAELLFLDLVPSLQLDPAQIYRVTWFISWSPCYSCAREVRAFLQENTHVRLRIFAARIADHWPLYKEALQMLRDAGAQVSIMTYDEFKHCWDTFVDHQGAPFQPWDGLDEHSQALSRRLRAILQNQGN

SEQ ID NO: 1230 - protein, 189 aa, synthetic construct
MEASPASGPRHLMDPHTFYSNFNNKIGRHKTYLCYEVERLDNGTWVKMDQHRGFLHNQPRRHAELLFLDLVPSLQLDPAQIYRVTWFISWSPCASCSCEVRAFLQENTHVRLRIFAARIADHWPLYKEALQMLRDAGAQVSIMTYDEFKHCWDTFVDHQGAPFQPWDGLDEHSQALSRRLRAILQNQGN

SEQ ID NO: 1231 - protein, 189 aa, synthetic construct
MEASPASGPRHLMDPHTFYSNFNNKIGRHKTYLCYEVERLDNGTWVKMDQHRGFLHNQPRRHAELLFLDLVPSLQLDPAQIYRVTWFISWSPCFSCACKVRAFLQENTHVRLRIFAARIADHWPLYKEGLQMLRDAGAQVSIMTYDEFKHCWDTFVDHQGAPFQPWDGLDEHSQALSRRLRAILQNQGN

SEQ ID NO: 1232 - protein, 189 aa, synthetic construct
MEASPASGPRHLMDPHTFYSNFNNKIGRHKTYLCYEVERLDNGTWVKMDQHRGFLHNQPRRHAELLFLDLVPSLQLDPAQIYRVTWFISWSPCFSCACEVAAFLQENTHVRLRIFAARIADHWPLYKEGLQMLRDAGAQVSIMTYDEFKHCWDTFVDHQGAPFQPWDGLDEHSQALSRRLRAILQNQGN

SEQ ID NO: 1233 - protein, 189 aa, synthetic construct
MEASPASGPRHLMDPHTFYSNFNNKIGRHKTYLCYEVERLDNGTWVKMDQHRGFLHNQPRRHAELLFLDLVPSLQLDPAQIYRVTWFISWCFSWGCACEVRAFLQENTHVRLRIFAARIADHWPLYKEALQMLRDAGAQVSIMTYDEFKHCWDTFVDHQGAPFQPWDGLDEHSQALSRRLRAILQNQGN

SEQ ID NO: 1234 - protein, 189 aa, synthetic construct
MEASPASGPRHLMDPHTFYSNFNNKIGRHKTYLCYEVERLDNGTWVKMDQHRGFLHNQPRRHAELLFLDLVPSLQLDPAQIYRVTWFISWSCSWGCACEVRAFLQENTHVRLRIFAARIADHWPLYKEALQMLRDAGAQVSIMTYDEFKHCWDTFVDHQGAPFQPWDGLDEHSQALSRRLRAILQNQGN

SEQ ID NO: 1235 - protein, 189 aa, synthetic construct
MEASPASGPRHLMDPHTFYSNFNNKIGRHKTYLCYEVERLDNGTWVKMDQHRGFLHNQPRRHAELLFLDLVPSLQLDPAQIYRVTWFISWSPCWGCACEVRAFLQENTHVRLRIFAARIADHWPLYKEALQMLRDAGAQVSIMTYDEFKHCWDTFVDHQGAPFQPWDGLDEHSQALSRRLRAILQNQGN

SEQ ID NO: 1236 - skipped

SEQ ID NO: 1237 - protein, 189 aa, synthetic construct
MEASPASGPRHLMDPHTFYSNFNNKIGRHKTYLCYEVERLDNGTWVKMDQHRGFLHNQPRRHAELLFLDLVPSLQLDPAQIYRVTWFISWSPCFSWCCEVRAFLQENTHVRLRIFAARIADHWPLYKEALQMLRDAGAQVSIMTYDEFKHCWDTFVDHQGAPFQPWDGLDEHSQALSRRLRAILQNQGN

SEQ ID NO: 1238 - protein, 230 aa, synthetic construct
  VARIANT 30: note = Can be any hydrophobic residue
  VARIANT 32: note = Can be any hydrophobic residue
  VARIANT 50..53: note = Can be any hydrophobic residue
  VARIANT 59: note = Can be any hydrophobic residue
  VARIANT 60: note = Can be any charged residue
  VARIANT 62: note = Can be any small residue
  VARIANT 63: note = Can be any alcohol
  VARIANT 68: note = Can be any negatively charged residue
  VARIANT 69: note = Can be any polar residue
  VARIANT 70: note = Can be any hydrophobic residue
  VARIANT 73: note = Can be any hydrophobic residue
  VARIANT 75: note = Can be any hydrophobic residue
  VARIANT 76: note = Can be any small residue
  VARIANT 77: note = Can be any polar residue
  VARIANT 88: note = Can be any hydrophobic residue
  VARIANT 91: note = Can be any turnlike residue
  VARIANT 92: note = Can be any hydrophobic residue
  VARIANT 96: note = Can be any charged residue
  VARIANT 97: note = Can be any hydrophobic residue
  VARIANT 98: note = Can be any hydrophobic residue
  VARIANT 101: note = Can be any hydrophobic residue
  VARIANT 102: note = Can be any polar residue
  VARIANT 106: note = Can be any turnlike residue
  VARIANT 107: note = Can be any polar residue
  VARIANT 106..115: note = Can be any hydrophobic residue
  VARIANT 130: note = Can be any hydrophobic residue
  VARIANT 134: note = Can be any hydrophobic residue
  VARIANT 139: note = Can be any aromatic residue
  VARIANT 141: note = Can be any polar residue
  VARIANT 143: note = Can be any polar residue
  VARIANT 149: note = Can be any hydrophobic residue
  VARIANT 151: note = Can be any hydrophobic residue
  VARIANT 163: note = Can be any polar residue
  VARIANT 166: note = Can be any polar residue
  VARIANT 167: note = Can be any turnlike residue
  VARIANT 168: note = Can be any turnlike residue
  VARIANT 170: note = Can be any hydrophobic residue
  VARIANT 171: note = Can be any polar residue
  VARIANT 172: note = Can be any aliphatic residue
  VARIANT 173: note = Can be any tiny residue
  VARIANT 181: note = Can be any charged residue
  VARIANT 183: note = Can be any hydrophobic residue
  VARIANT 186: note = Can be any hydrophobic residue
  VARIANT 190: note = Can be any polar residue
  VARIANT 191: note = Can be any polar residue
  VARIANT 192: note = Can be any turnlike residue
  VARIANT 195: note = Can be any aromatic residue
  VARIANT 199: note = Can be any polar residue
  VARIANT 200: note = Can be any turnlike residue
  VARIANT 204: note = Can be any polar residue
  VARIANT 211: note = Can be any positively charged residue
  VARIANT 213: note = Can be any polar residue
XXXXXXXXXXXXXXXXXXXXXXXXXMXXXXFXXXFXNXXXXXXXXXXXXXXXXYEVXXXXXXXXVXXXXXRGXLXXXXXXXXXXXXXXHAXXXFLXXXXXXXLXXXXXXXXXXXXXXXXXXXXXXXXXXXXXFXXXXXXXXXXIFXXXXIXXXXXXXXXXXLXXLXXXGXXXXIMTXXXFXHXWXXFVXXXXXXXXPWXXLXEXXXXXXXXLXXXXQXXXXXXXXXXXXX

SEQ ID NO: 1239 - protein, 230 aa, synthetic construct
  VARIANT 30: note = Can be any hydrophobic residue
  VARIANT 78: note = Can be any small residue
  VARIANT 79: note = Can be any positively charged residue
  VARIANT 124: note = Can be any hydrophobic residue
  VARIANT 125: note = Can be any small residue
  VARIANT 128: note = Can be any small residue
  VARIANT 210: note = Can be any turnlike residue
XXXXXXXXXXXXXMEASPASGPRHLMDPHXFYSNFNNXXXXXXXIGRHKTYLCYEVERLDNGTXVKMDQHRGFLHNQXXXXXXXXXXRHAELLFLDLVPSLQLDPAQIYRVTWFISWSPCFXXXXCAXEVRAFLQENTHVRLRIFAXARIADHWPLYKEXALQMLRDAGAQVSIMTYDEFKHCWDTFVDHQGAPFQPWDGLDEHSQALSXRLRAILQNQGNXXXXXXXXX

SEQ ID NO: 1240 - protein, 230 aa, synthetic construct
  VARIANT 79: note = Can be any positively charged residue
  VARIANT 30: note = Can be any hydrophobic residue
  VARIANT 78: note = Can be any small residue
  VARIANT 128: note = Can be any small residue
  VARIANT 210: note = Can be any turnlike amino acid
XXXXXXXXXXXXXMEASPASGPRHLMDPHXFYSNFNNXXXXXXXIGRHKTYLCYEVERLDNGTXVKMDQHRGFLHNQXXXXXXXXXXRHAELLFLDLVPSLQLDPAQIYRVTWFISWSPCFXSWGCAXEVRAFLQENTHVRLRIFAXARIADHWPLYKEXALQMLRDAGAQVSIMTYDEFKHCWDTFVDHQGAPFQFWDGLDEHSQALSXRLRAILQNQGNXXXXXXXXX

SEQ ID NO: 1241 - protein, 230 aa, synthetic construct
XXXXXXXXXXXXXMEASPASGPRHLMDPHTFYSNFNNXXXXXXXIGRHKTYLCYEVERLDNGTWVKMDQHRGFLHNQPXXXXXXXXXRHAELLFLDLVPSLQLDPAQIYRVTWFISWSPCFXSWGCACEVRAFLQENTHVRLRIFAXARIADHWPLYKEXALQMLRDAGAQVSIMTYDEFKHCWDTFVDHQGAPFQPWDGLDEHSQALSRRLRAILQNQGNXXXXXXXXX

This listing of claims replaces all prior versions, and listings, of claims in the above-identified application:

1. A method of detecting methylated cytosine comprising:
(a) providing a sample comprising a target nucleic acid suspected of comprising single-stranded DNA comprising at least one unmodified cytosine and at least one modified cytosine comprising 5-methyl cytosine (5mC), 5-hydroxymethyl cytosine (5hmC), 5-formyl cytosine (5fC), or 5-carboxy cytosine (5CaC);
(b) protecting the at least one unmodified cytosine (C) in the target nucleic acid from deamination by adding a protective group to the 5 position of the at least one unmodified C to form a protected C; and
(c) contacting the target nucleic acid with an altered cytosine deaminase (ACD) after step (b) to form converted single-stranded DNA.

2. The method of claim 1, wherein a methyltransferase enzyme catalyzes addition of the protective group from an S-adenosyl-L-methionine analog (XSAM) to the 5 position of the at least one unmodified C.

3.-7. (canceled)

8. The method of claim 1, wherein the protective group comprises an alkyne group, a carboxyl group, an amino group, a hydroxymethyl group, an isopropyl group, or a dye.

9. The method of claim 2, wherein the XSAM comprises carboxymethyl SAM.

10.-12. (canceled)

13. The method of claim 1, wherein the ACD is based on a member of the APOBEC family, such as the APOBEC3A family.

14.-17. (canceled)

18. The method of claim 1, wherein the ACD comprises one or more stability-enhancing alterations, preferably two or more stability-enhancing alterations, wherein the one or more stability-enhancing alteration is a substitution mutation, a deletion, an insertion, or a combination thereof, wherein the one or more stability-enhancing alteration is selected from Table 4, 5, or 6.

19.-28. (canceled)

29. The method of claim 1, wherein the ACD comprises one or more alterations that provide 5mC-selective deaminase activity, optionally wherein the one or more alterations comprises (Tyr/Phe) 130X substitution, wherein X is selected from A, G, F, H, Q, M, N, K, V, D, E, S, C, P or T.

30.-33. (canceled)

34. The method of claim 18, wherein the ACD further comprises at least one selectivity-enhancing alteration, and wherein the at least one selectivity-enhancing alteration is a substitution mutation at a position functionally equivalent to D133.

35.-58. (canceled)

59. A method of detecting methylated cytosine comprising:
(a) providing a sample comprising a target nucleic acid suspected of comprising single-stranded DNA comprising at least one modified C comprising 5mC, 5hmC, 5fC, or 5CaC;
(b) protecting at least one unmodified C in the target nucleic acid from deamination by adding a protective group to the 5 position of the at least one unmodified C to provide a protected target nucleic acid;
(c1) contacting a first aliquot of the protected target nucleic acid with a first altered ACD after step (b); and
(c2) contacting a second aliquot of the protected target nucleic acid with a second ACD after step (b) to form a converted single-stranded DNA.

60. The method of claim 59, wherein the first ACD comprises 5mC-selective deaminase activity and/or wherein the second ACD comprises 5mC-, 5hmC-preferring activity.

61. (canceled)

62. (canceled)

63. The method of claim 59, further comprising processing the converted single-stranded DNA to produce a sequencing library, wherein the processing comprises amplifying the converted single-stranded DNA to produce double-stranded DNA.

64. (canceled)

65. The method of claim 63, wherein the processing comprises fragmentation or tagmentation of the double-stranded DNA and addition of a universal sequence to the double-stranded DNA fragments.

66. (canceled)

67. (canceled)

68. The method of claim 59, further comprising detecting the at least one unmodified C and the at least one deaminated modified cytosine in the nucleic acid.

69.-71. (canceled)

72. The method of claim 68, wherein the detecting comprises sequencing the converted nucleic acids or hybridizing one or more nucleic acid probes to the converted nucleic acids.

73.-86. (canceled)

87. The method of claim 72, wherein the sequencing comprises processing the converted nucleic acids to produce a sequencing library, optionally further comprising:
providing a surface comprising a plurality of amplification sites,
wherein the amplification sites comprise at least two populations of attached single-stranded capture oligonucleotides having a free 3′ end, and
contacting the surface comprising amplification sites with the sequencing library under conditions suitable to produce a plurality of amplification sites that each comprise a clonal population of amplicons from an individual member of the sequencing library.

88.-108. (canceled)

109. A method of detecting the location of a modified cytosine in a target nucleic acid suspected of comprising at least one unmodified cytosine, the method comprising:
(a) contacting the target nucleic acid with an altered methyltransferase having carboxy-methyltransferase activity and carboxy-S-adenosyl-L-methionine substrate rendering at least one unmodified cytosine (C) in the target nucleic acid resistant to deamination to form a treated nucleic acid;
(b) contacting the treated nucleic acid of (a) with an ACD to produce a converted nucleic acid comprising at least one converted cytosine; and
(c) detecting the at least one converted cytosine in the converted nucleic acid.

110. The method of claim 109, wherein the ACD has cytosine-defective deaminase activity, wherein the detecting comprises identifying thymidine nucleotides in the converted nucleic acid to determine the location of 5mC nucleotides in the target nucleic acid, or
wherein the ACD has 5hmC-defective deaminase activity, wherein the detecting comprises identifying cytosine nucleotides in the converted nucleic acid to determine the location of 5hmC nucleotides in the target nucleic acid.

111. (canceled)

112. The method of claim 109, wherein the detecting comprises sequencing the converted nucleic acids or hybridizing one or more nucleic acid probes to the converted nucleic acids.

113.-118. (canceled)

119. The method of claim 109, further comprising providing the target nucleic acid, wherein the providing comprises preparing single stranded (ss) DNA from a sample comprising the target nucleic acid, wherein the target nucleic acid comprises single-stranded DNA, genomic DNA, or cell free DNA.

120.-125. (canceled)

126. The method of claim 109, wherein the target nucleic acid is obtained from a subject, wherein the detecting comprises obtaining a pattern of cytosine modification in the converted nucleic acids, the method further comprising comparing the pattern of cytosine modification in the converted nucleic acids with the pattern of cytosine modification in a reference nucleic acid, wherein the pattern of cytosine modification is linked in-cis to a coding region that is correlated with a disease or condition, optionally wherein the pattern of cytosine modification is linked in-cis to a coding region, wherein the coding region in the reference nucleic acid is transcriptionally active or transcriptionally inactive, wherein the comparing further comprises determining if the pattern of cytosine modification of the converted nucleic acid indicates the coding region is transcriptionally active or transcriptionally inactive in the subject.

127.-133. (canceled)
